United States Patent Application Publication US 2026/0258423 A1 - sequence listing, part 52

SEQ ID NO: 301568 - DNA, 83257441 bp, Homo sapiens (residues 27,752,492-29,887,298 of 83,257,441)
  source 1..83257441: mol_type = genomic DNA
acagtaggccttcaacaaataccacttctcaccttagtggtaaaatatggcactggaagtaatgctcttggctgtgggagctacagagagcaatgaggtctctatcaaacccagcctcctctctctcaagaggaaccaatggggataccctaccccccaaccccaaagccctgtgcacctgggggtaaaaatctgggtgccacgggctcaggaaggctttcttgggagcaagagggaggtgggtgtgtccggggaggcatttctgagcacaagagcctccctggagttttgccaccatctcctcccattctgtggtgcccgcgataaccactattctgactctcctcacccctccagcctcccggcgtgtggcctgccaacccggctcccattgtaagtctcttgctttctttttggatcgtcctcattttggcttttctgggctcatggaggaggcagggccaggcattgggcctctcccattgggagtggggagggcacaggccaggcccttgaccatctgcccggcctggtgaggttgggggttggatgtggttggctggccgtgatgaaacaacctgagttgccaccccgtgggcagccacggaagaccatgccccacattcacttctgtcacctgcaaagggaggctaggctgagagacgtttccccgagaggaaagatgggccagagccaccagcgtccccatctgtcttctccagggttctaacctttgcccctcgctcatccccttgagagaagagacacctgggcccaccctctgtggggtctgtggggccattgggcttgttacgccccctggagggtgcctgccgtgtggcgccctctggtgggagctggtggttttcacacgtgagagcctgggtgagacctggtttctttcttccagacccagacagtcatccacacagtgcagagcgcccctggacagatgttctctgtaagtctacaagttctggtcagttcacagctgcacagtgtcctccttcaccaagaactaaattccctagagcgctagagttgggaagaaagcggtttagcaaggaggatggggacactaggggctgagtgcttggctcaggtgacatgtggctaaagctgtccttgggacagcagagattctggaagaagcaggatttatccagtggtggaagaggcaagccccctagagaccgggagggaaactggtctgtctgtcaccaagtggggagtgcagtggccccagcacccggatgtgaggttcctggccctgcatcctgggtccccaggatgtcactaccgatcataggcttaagctcttctcctgctggtgcaaatcaggccggaagtttagcgttagtggggctgcctgcagaggggttgagggacaggtgaccgtggtggagtccgggaacacggcaggaagttccaggaaggctaacatgaaaagggaggtggatgggggagtccaagggccaaaggctcatgaggtcagcctcacagtggagcccctctagaatgcatgggtgcgcgtgggtgagtgctcgcgcacacatgcgctctcccattgaatttcctggtttcttttcagcagactcccgccaacccacctatgatgtacccccaccccacctatgtaagtgatttctcagggagggcggaggttctgtttgtggtgggcaggctgggggtgaagggccacttcgggggtatccactagccttgcaaaatgaaaagcgaagggctttcaaaatggtaagctgaagggcttcaaagcttcccagcgaattagaagactgtggagaggagctttcaaccttaaaactgtcgtgtcaatacgagcgcattgcatggctctcccttttcaccccacgagatgagtctttttgtgtttggccaaagttcctttcatgacactaatctaagcccattaatatgaggagcactggaaagttttcctttggcttttatggaaccaagtacagatatcgttggtttcttcttagctgacagcccaaattcatgggacctggtacaatcttcccttttgtgtggtgggctgccctggctgccactggctgacccatgcctctccttctgaaagccgacgccttttgtcaccatcattccgggagggctgtacccatccaagtccatcatcctgttgggcactgtcctgcccagtgctcagaggtaagctaagggctccagttgacctctgggaagagagagcccttcaaggtgattccagccattcccctggctttgggcaggctgtggatgacggggaggaaataaggcccagaactcagtggacaaaggtccaggtgggctgcccaccccaggttccacatcaacccgcactctgggaaccacatcgccttccacctcaatccccgttttgatgagaacgctgtggtccacaacacccagatcaacaactcttaggggtctgatgagaggggcacagctggggagaggtggggagtgggcagtgaagatgaagccccatgctcagtcccctcccatcccccacgcagctccaccccagtctcaagccaccagctgtccactcctggtgggaggtgacgtcctcagtccctcccctctgacctttaacctaactctcaccttgcaccctgcatcaacccttcaccccctcctggaaagccagcctgatggcatcccactggcctccaccaactgaccagagtgttctcttcaggggactggctcctttcccagtgtccttaaaataaagaaatgaaaatgcttgttggcacattcatgtgggttgaccgtggcttctttaattcatttggagacattttggagtctgtggaatcgggcggcggtgctgctgagaggagtgggatgggaaagcatggactccctttgggcagggggtcctgacctcacacctcctcccagagggtccctcacaaatcccacgagggtgttggagaaagcaggctggggctctagccttttgggcaggagtctcggacacaggaaggtggtaatgggggacaccaggaaacagccccatgcctccgagatgggagaggggctggggcagagcctgtgagggccacagcagggtcagagctgcctcctcagacctggcgtcccagtgggaggaggtggcttggggaggggggtcaggagaagccaacccgaagcaccgtctgggtgtgtgttccattgtgggtctctccggcattaggggttagggcttgcataggaaaagtggctcagtgttcatgtgtggggttctgccagccactgggccactgccaggaagcccgactctgcatccaggtgatgccaacacatcctgctcagcccagtaagaatccagttcctcaggccccatagtagtcctcagagcagtggcaccagctgcatccgggagtttgttggaaacgcagcatcccgcgccccacccgacctgcgaggtcagagtctctgttttcacaggaccccagacgaggtgcgcacattaaagctggaaagccctggtccgggagcggactcctggccttgttgctgagatgcacggctgtcgcgcagggcatggagctttcctggagcctgaggttggcactgccccttctcctgcccctgagatgctactgctagaaggggaaggtggcgggcaagggggtgaagtcggccagggcacccaggaggcagaggccaaacctaagctgggagccgtgtgttgccaggaccccagtggccgccgctgagctccttttttggttctgaccaggagaaggaaacggggcccactctcctaagaaggcttccttggcctgctccaaacccaagagggtccccagtccctcaggcgaggatgctgtggcccacactcgcctcgacacgctgccttcccagggaccacatccgtactggccaaggcacagtctcgcatgagactggtggccccagagcaaaacgctttctaagacagtgtccaagaagaagctcaaggccttcctcgaaacactggccttatgcgacaatcccaccctcaccagaccccgtttcagatactttgtgtgggaggcaggcctgcgccccctgccctaccacaggtctttggaccagcacgaagctccatctgctgctggcacacctggcagccatttcagaggagccatggactggctggggtgtccctctgtcggggatctgtccaggctgtgacacccaccagctccccactctgagaagagctttccctacaaaacacccacacacgcatacagtgtgattaaagtaaaatgcaattcatgtaaatatctccatcaaggaatcatacagggaagacccaagtggccatggggaacagactgggtgttagttttttaaatacagaggcataaataactgtacacaaggcagttaaatacacagtggtgcgatagcacctcctggtggtcacttgaagtggtgcactcagcagcaagttccatctttcacccacttgccaggcctggcatttaagattttgtctccaagggaccagggaggccccagtttgagagaggaggctccgatcaatccagggtgctacttgttaggaggtcaagtaaagggcttgatggggagcaacgttgaggaaataagacttgaggctgggggatatcactttcctccatctccccaggccctgtgacctcagataatgcagagctggctccatccttaagttctgtgccggcagctttaacccctcctgtaggccctcagagcgctgacatctccaggctgctgggctgcaccgccaccctgtccttcttcgcctcgtaaggaaatacagcaccaaagatatcttcgtgatagcgcttctggctcttttaggtaaaaacagagagcaacgtgtcaagtccaggctgggatgagcccctggggttgcccagcttccctatcacatggaccttcatgagccatctgtcttcccaactgttatacttagattgtgcttgaatctggtttagaccctaaccctgctcagcacctgctctggtgcgggccctctaaccatctccaaagctttacttagcatacccatttcctgcccagcgttcatcccccacccaagatactccaggaagtgtgagctctgagataaatatgtttgggaaatgctacgtcctttctttccttccagccttgaagggtcctgatgaacagcagcatactgaaggctcccagaagtcttgtagtaaagcaacgtgtttgccttgccttaactaagcatgtcccaggctattcgaccttggaatctttttgatgccaactgtctaccgacccactgaacacatttggggaaatgcctgttatctcctcactgttcttcaaacacgccagcttaactcccacccccggggcctttgtacctgctgcccctccagaacagcccagagtgtttccttcagtatccacagggctcctcctcaccatctcaggtttattctcagatgccaccttccagctctgccttccctggccaccctatttaaaattacactccccagcgttccctgggctgtttcctgctgtttttctctgaagcactacacctctttcttgtctgggtttgtcagccccagtagaatgtaaagaatttttgcctgattcatttactgctctatccctagcacatagtaggtgctcaataaatgttcagttgaacgtatgaatgtgtcttagggagagtatggaagtgacaatcacaggctttggaaccagagagaggcagactgaactctaggctctcacatttactgctgtggtccccgtaggcccccttccctctgtaaaagggggtgcctccctcataaagtcctcggcaggactgaatgaaatgtcacatgagaatccttggcaagcagtatgcccagtgtaagcccttgataaatatcactattatcttcatcaataaaatgcaagcccttcctgctggggggatgagggtgagcagacaccagcctgggtgtaaataagaagtgtgaggttcacacgaggctgacggggggcagccttgctctcccctgtgttcacagccttgctttggccacacagatactttctgaaaggggggtttggggagaggccagggagactctcctgcccccattctacagatggaaaaatggaacacattcacccgacttctcaaagctgccaactggtccaggatgtgcagtaaggccatctgacagcccacccagctcagatctcagccactgctaagattctcttggggtccagaacctttctgggcctgattcccctgggtctacctgccacccctggtcctggctccaacggcctgtgcccttggccggcaccttcagcccacacacccactactataccttgagctgaaagaaatagtcctcgacctgctcctcattcaatttcagcttggcagccaccagctgcttcagggtgtgggccacgtcccgggccatgcgcacatccccgcaaacatagaggtggcctggctccttgtggagcacacggagcacctcgctggccagctgctgccgcaggatgtcctgaacatagacctgaaaccagaggaaacagtgggttcagtcctcagctgctcaggacaaggcttgcaggcaggcctgctggcctcaaggaggcggggagaggggcactaaggggtgaggagtgagtccccttccagccaggaccttgcaaggggccaggctcaggatgaggtgcatggatgcccctggggctcggctgggattagagagataaatgctggacacagtcctgccctcgaggggctgaccatccagtggggatcccagactgtctctgaatttgccatgcttcaaaaaggcatcaatgaaggcagtccccctgcccagggctctgcctacaccccagaaaagggagcctctcaatgcagtctacccattaggtctctgcagggtatggatcccgggctccccagatacaaggtccaggagtcagtcagggactctctgctcctgctccacacaggatgcccagtggccccagcactgggcacagagcactgggcccaagaggtgccctgatgggacaaatgtgtgaaggccgagagtctattctgacaccccaggctcagggggtaacgcggccctggggacagaagagcccctctgatggccgtggtggaagcatcggccgccctccagccttgcaaggcttgagcgtagccagcctggaccacctctccccgggcagtcgcgtgtcccagggggcctgctggggaccttcagcaggctgggctctggggttaacccgcgtgtgacctaggttagtcctgaacctctccaggtctgtcgcttctgctgtatgagagggtgtaatgctcttcacagcatcactctgatggttgtgaattaccagcattttcgagctcaggaggtgaaggctcggggaggcgaggggcctgtggggacccagggctcacagtggagcttgtgtgtgtaatgcttcacctgctttgaggctgcatttaccttgggcttgccaggcaggcgggaataggctgtgtgcaccgcatgcagcacccccttctgggccatctccagcatctcctcctggtagatgtggtcctcatctgggcggcggcacccaaacaccaaggtcatgcggcctccccgcactcctgcaggagtcccgggctgttgttaccatgttggccaccagagggcgccagggctccaagcccaactggaattctcacttcactcccactagctatttaatagcattatccccactttacagatgaggaaactgaggcccagcgcattcagatcactcatccatagtcacagaactgaaagtgcggatgcagaattccctcagccaatcggagatcaaaagcagggactttcctgttacctccactcccaggagagggagccctggctactatgcgggagacggaaaggcagccattctaacccgcagaggcccgcacagggaagcaaacttgggaggccttccctcgagagaggtcaggaaccgtttgtggggctgcagttctgctcctaggcaggcgctggccccctggtgcccctcccacctgggaagcctccagccttacccttgtgctgggagtcatggagccgttgctgccagaaactgcggaagggcgcgatgcctgtgccaggcccgatgaggatgcaaggatgggagggatcctcggggaggtggaagccgctggcactgaagaggacaggagaagagggggccagtcctcagacaccccaggcccacgcacacacaggatggctggggagctgggcctgtgggaggcggtcgtgagggggtggagaggacaagaagctcctatttgatttcccacgtcctgcaggctgcttcacttctgtccaggcaccagcacctcccccaggtccttctgtaaaagggccaagctcactggactcttgagacccacctgtcatcgctgtccctgctacaggcagccacaccagtgtgaccccagtgccttctttatgggccaaggggctccgagcgtctcctaaaccccagatccctccctttcctcccggaactcccaggggtcggcggccccacaggggacagagtggaaggggtgcttacttccgcacaaagcagggcactgggtcttggggcttcaggctgttgagccatgtgctgcagacgccgtggtgcaggggaccctggccatctgcaacgataccacaaagtgaccaacgtccccccactgcccatgcgcaaactgtaccagctgctccgcccacaccacggccctccttggacgcccccactcaggcactctcaggactcaatgagcagctgtttgtcctcctggttctgagatccaccctctgtaagcgcggagctgaggaacgttgaaagggacttagagaggctgcaagttgctccttctgcccaagcagaaactgagacggggagaggaaaagtgacttgaaaaaggtcactcaggtcgtggtggaatcaggtggacagctcagcttccctgactcctactccagtgctccttccaaagactttctccgggaacactcccagctcaccactgagctccactgacagcagcatgaagtggcccctcagggtggctactgctgtgcgtgctcatgagcgtggcccttgctggtagcaaccctgggtggtggatgagttccgcgcatttcagcctgctctggcaccttgctttcctcctcagtgggccctcctgggcttgtagaaacccaggaggtctctctgggttgtgttccctttacaatggcccagcacttgaggaaggcctccaaccaactgcagaggtccccctggttttcctcgggattaaactttgatctcacaggacacgtctgcctctcctctcctggtctgggtggctgttctctagcagggcaaatagagtctctgccaaggttttagaaactgtgtttttgcttcttgaggacagagggctcggaagtgtgggcagctcccagctttgccaacccaggcaatgctcagttacagagggcagggcagggggcagcggccagtggtggagccgagaccacctggacgagatgttggcctcccgctctatggcagcgtcaccccctgctctgcttccctcagtgaccctgacctttccttcttggcttcagcacaatgaaaatcatctaattatttctatgcctatctctccactgccgcctctagatgctccctgagggcagggctgatctctgttgtatttccatacccaccccagtgccaggcacccactgaatagctgagtgagtgaatgaataatcaatgcagaatctcccctgcgttcaggctgcatgattgggaagactaagaaccactggcctcctaccaagggttgagtgctcttcacatctgatctcattaaattgtcccaagagtagtgggacagtggagtggtggaggacttggactcagcagttagactatccaggtctgaatctcagctctccacttactaacagtgtgactttctgtgccacctgtaaaatgcacacagtgcctaccccacaatgtaactgatcatatacatacagaaggcttggtttagtgcctggttcctagagatctctcccacacacctcctaatactgttaacaactctgggctgtgggtgttccctccctccttgaactgatgagggagctgaatctgagttgatgaacagatgtccaataatgggcggagcggggctgttccagagcctctgcccctggctcacctcgggtgtggtaggtgaccacggccacagtcaggtggatctctgtgggcgtgtgatcccgggaggagctgatggagtagaacctgggcttcagaatggggagctgggaaagcaggaagccagcagacacccgcagggacgggaactcctctagcacctccaggaatgtggggctgttggtgaacttccacttgctgtactctgagggctaaaagccaagggtgatgtcagtgactcagggcgcctgtcccgctttggggaaaagactgtcacaacccagtattcattcattcattcactcactcaacaaacaagtccatgtgccaggcactgtccatggtgctgagacgaccaaacttgagacaaaataagtgcctgtcctggaggaactcagtccagtacatttatctaacttgtgttacctccactgtcggcaactcatgggcaggggtcaaatctttattgtaatttatttggggcaaggctttggaaccaatcagacctgggttcaaatcttggctgggtgtcctcactagctgtggaatcttgtcccaattaccctttgtgaaacaaggacagtattgcctgtcttgtggggatgttatgggaattaaatgagaaagcatgtgccaagttagtacattgcagccacaaaataatggcggtggaggtagcttaaattgagataattagctataatgatgatgataataatgacaaccagtgccttttgcaaagacttggaaccagacagttgcaggtgagttaacgcattctctcattaacttattaattcagctctccatctgtcactctgcccattatgcccatttatccattcatccacatcatccatcccccaatacatcttaagtgacaagtttattccagttttggggaaagcaaagacggataagggcggctcccctttctagctaatgttcaaggcagtgcactctggttgcatcctgcagacacttggaaaaattcagttcactcaacacaactgtgtcctagacatgggccagcggacgatgcctggcttcccaccagcctttgacaagtctcactttgggaacctggtgtggatccctcttgaaagttaaaaccagctctggactctggctccccacatgctgggaccccccacatacccccactgcccaccagccctgatcttcacctggcacagggcctccagcctctgtctctcaggctcttctgtggccacctgggccagcttttggagcagcagctgggttgggggtgtggtgatgtccaggaagtaggtgagggcctggctgagtgagcaggggggcagcctcttgtcactgacccagtagctgcctggatggggaaggaaggtgtcaggatggaaaagaggccccattcaggattctcagcaggtagcgaggcccccaggcagacaccctctattctccagctgcaggggaaaggaggctctaaagacctggctctaagagcaaaaggcaggaagaaggtggcgcatggagaaaggactgccagggaaggctgatcaccagcccccaaaggggcagtaagttggcgtggtcctgataaactaaccacgtccttctctggcccagacctgaactttagcaagacactcactggtgatctacagactcacaatgactaaatccaccaaagactaatggatacctcacaggccagttgttcacttagagagaagcccatgactgcagtcccctgggtgctgtaccaagatgtgctgggtgagcagatgagcccaaagggaagtcccagggagcagcatgcagggcagtcacagcacagaccctggtgccagaagacacgggttcaaaccctggctccccacttctgaggtgactgaagcctctgggccttggcttccctccctgtgaaacagatctgatagcacaacctatcttgctgggttggcatgagcactgaatgaaattgtgccataatagttggtgccgtgcctggtacacagatgctttgtaaacactgggtaaaaataagagcctgacattctctcctctggaacagagtcctgatgaaccacatccttcaccctacagtcacaagggcaactgtcttgtcgtccccacgtctcaggttctctcactttctcctggacagtgggggtcactgccaggctctgtttctctgatcccactttcttttttatttttttgagatggagtctctgtcacccaggctggagtgtagtggcgagatctcatatcactgcaacctccacctcctggcttcaagcgattcttgtgcctcagcctcccgagtggctgggattgggataacaggcatgtaccaccattcctgtctaattatttttgtatttttagtagagacggggttttgccatgttggccaggattgtctcagactcctgacctcaagtgatccacccaccacggcctcccaaagtgctgagattacaggcgtgagccaccacacccagctcatcccactttctgactttggccactgcattgagggggatgttatcattagggaaactaaggccagggggccatgccttatgggctgggactgtttccacagctgctttcacataagctttggtggcccgccctctcagcaggaaggacagggatggctgtcaccggcaggcccaggctcagcccctcagccaggtggggcggccagagggtgccaggcagcactggctttctagcccggggctcaccactctcatccagggcctccaggcgcactgtctggtggggtgtggggccatccaccactcgctccaggataccttggaccagggccggctggttgcctgggcaaaccccaaggtgctcccccggcaggtagttcaggccttggccatcctcacaggagagttccaccaggatggtggcacggctggggaaggaaaatgaagcctcaggtgacattgcaggatttcctccagggctccttgatgggcaggcgagattccccaggaaatgtgccctcctttcattttcctggctggttccacaagctaggccaccaccctgagcttgggatgaggcatccccacaggcaggggtgcttaagagggccccaggagcttccctctggggaggaggggggcccaccccttcccagcagcccttggagccccccgagggcttggctacagcctctgcctaaagaaagcatccgccttggacatacatggatatcagaagaaacctttccttgttgccaggacaaaccctgttcttattagaaccaaggccagttttcctaatgcatgcggggaggacagcacagatcaatgaaacctgcagataatccacaaggctctttcccagagctgggaaatttccttccctgccaacacttttcctgaaagttcttaagaatgaatcaaacagtttaagtctctcttgcactctccttttagtgaaagagttcaatgaggaaggagaggaagtggagcagatgcttagagtccaagctggaaaagtggctcgtggttaaccaagagtagacgtaaaagcacaggtggccgcaggttaccaggtgggccggtcctaccgacagtgtggctgctaatgccagcatatgctcttctcctctcccttcaaagactgacttcttctgatctttcattcgttaaaataaaatcgacagagtatcacccacgaagccctgcactttcccttacctggatgtcggactttgtagattctgccgagatttgagcctcatggtgaacacgttcttggcatgcatgctgctgagggctgtggaggacacagagacggtgaaatggcaaagtggttcttgagcgtaggtaggggaagcccccagatgtctgagtcagtgacatctgaacaccacccttggggcatcctgctgaggtggccgttgggtttttctttttcttccttttattccacaaataaagatccttggtccaggccgggcatggtggctcatgcctgtaatcccagcacttttggaggccgcggtgggtggattactggaggtcaagagtttgagaccagactggccaacatactgaaaccaggcatggtggtagtgccaatagtcccagctacacgagaatcacttgaagccaggagacggaggttgcagtaagcgggaatcgcgccactgcactccagcctggacgacagaccgagactccgtctcaaaaaaaaaaaaaaaaaaaaaaaagctccttgatctgatacagggcagcttctaagtgttgcttctaggtgttgggaaattcaatttaggaacctaaaaatggaaagtcccgggacatctccatggcttgggatccacaggagagcattgttgacattggggatatcttaaatatgcagaaaccttcaggactatcttagacagggcacagggcacagcacctgggggtgcagagtggagagttcaccactacagcctggaatcgcctctgtgacaccttctctacgacacttggctgccttcgcagctggaaggctggggctcagaccccaacatggccacaggctagcagcttgcttcacctccttgaactgcaatttctccatctgtgcctttctcccaggaggagtgtccaggctcacttagcccatgtgggccaggagccccgcacagtgtctgacacacagtaggcccttggcggatgctgatcccttctgtctccaccaccctcctggggctccctcctgaaacagcctccctcagcaccttgagtattatgccctaacaggctcttgcatgcagtgagagggaggccccgaggccagctgtctctgttcagaaagacctgggggtctccttgaccatgggcttagggctcagaccccaacacaaacaagccccatgtgctgcagagaagcaggtacctttgctgaggtccaaaggctgtgagtcctgcacgagcctgtagtggtgcgggtcccaggtcacattggaggtgtagagcttggggatctgaatgtgctgtttgcctcggacatcaaacgtctcacaggctgcctggaagaaggtggagcagactgcggttaatggtcagcagcagcagcatccccaccactggggctaccactttttaggcccttaccatgggccaaacactgagccgtgtgtttcgtgtaacttcgaagcacacttacctgatagggtgacagcaaggactcaaagaggtgtctgggcttggcacatagtagctattgctactattataaatattgctttgtttttgttttgagacagggtctcactcagtcgcccaggctggagtacagtggtgccatcatagctcactgaagccccaaccacctgggctcaagcaatcctcccgcctcagtcccgtacctgtagctgagactacaggtacgcacaaccaagcccagccaattttctgtattttcggtagaggcaggtttcacatgttactcaggctagtttcaagctcctgggctcaagcaatctgcccacctcagcctcctaaagtgcttggattgcaggcatgctccactgtgcccgaccactatgaatgccaatattgacatgatcttgttgtatcctcatgcccacactggaagaggtctgattgctcttatgttcctggtgtggagccacatggaggaggcctgggctttggaaccaagcctgccccgatgcaagctgatgctcctaagcaccaccgctgagtgacgctctgcatgagtgacgagttccctaaatgactggggcaatcacagcaataaagagctatggagatactgagtggatccaaagtggatccgccattgtgtggtgcctgtccccaggctctctatggctgtgagactgaaacagacacagtagttaagaggtgacctaggtagtcactggaggaaagaccttaaactagaagctccctaagggcaggggggtatctgtgccaccttctcccccagagttgtgtgcacaaggtggagctcttctagggggctgagggagagcagcagtgacctaagccctcaggtttgtggccctggcccatgcctgggaccacatctacaggaccacaggcagaggtcatgccacctgggacgcccagcacagatgtcctaggcatgaatgcaccctgtcatgtccctgctgtggggcagctctggctgggaactgaccttgaaggtttgcacggcccagctgcggaaggcgtcctcctgcccactgagctcatccccttctcccatcggggtgagctgagaggcccccaggtgggacagcttctgatcaatgtcatgagcaaaggcgcagaaccgagggtacatgctggagccgaggccaaacacagcgtacctgcccgaggacacacacagagacacatgtcccatgcaagcagcacctggcacccagcacccagcaccaacagcctggagagccagccccagactctccccctccagctggagaatggagctggacccccttctggtcctctccatcccccagccttgtcaccaactcccatgaccaccccatgcttggcctgcagacctgtgagagggacttggtttctgtggtttgaccctcgacacattctgagtacagaccttagacccaggtctctgtgcctgcacggttctgagaagaccccctgtgcacacccagttccatcccctgaacccagactttgggtccacagggcagggctaggagtaggacaacggaaaaagctttacctgaatttgttgttgagctctttcagcatgaagagcgatttcttcagtttctagaaagagagggaatgacagagttctcaagccaggatgaataaaaacactgttttttcctttcttctggaaacctggccacagcttgcaggagaaggctcacagcccaccacggaagttggtttacatatggggctacctggccaaggacctggttgtcagctgacaagtttagcttgtctctcactccaactaaactgtagcaacttgtgtaggccctgcctcttaatgggggacctggaacagctgggcccccacccatccagccctggcagaggggcctgcctggtagcatgccttctccagaggggctccgaatgcgccgtgattctgtttggaacccggtagaagcaacaacaattggtcctacagtctctgaaataaggctggctttccaggaagccaagatgattccaggaggtatgtgacccagcagaactagcgtcaaatcccatggtgagtatttactcccttttcataatttattttttagttattccccttcaattacattttcattcttcggagcactggagagacagtctcatattggtgctaatagacctttaatacctctctcattgcctattagtcttttttaaaaacaaagatagctgagcacggtggctcacgcctataatcccagcactttgggaggctgaggcgggcggatcacctgaggttgggagttcaagaccagcctgaccaacatggagaaaccccatctctacttaaaaaaaagaatacaaaattggccaggcatggtggcgcgtgcctgtaatcgcagctactcgggaggctgaggcagaagaatcacttgaaccagggaggcagagtttgcagtgagctgagatcgcaccattgcactctaccctgggcaacaaaagcaaaactccacctaagtaaataaataaataaataaacaaacaaacaccaaaaaccaaaaaacaaacaaaacaaacaaagagcaggccttggccagggaatagtatctagctaaaattcattaacttcattttgttttcattgaatttatgttttgctgctttccatttgtgagagtgatacaagtttcctttaaatatgaatttgtaaatacaaacaggtaggccattcacagaaatatattaaatatgtcataggaaaggtggcactcccatatggcaataattacaatggaggccggcaaatgacctgagtgacccggagtggcctgagcactgactcccaaatgtcctccgtaggacctgccgcatcccccagaccctttcctgggtcctcccgtgccctaccaccccctagaccagccagacctcaagccacccacctctccattgccagggcagtctccattgccaaacgtactggtcaccaccaacagcagccgttcctcctccaggcagctcagcctgtacttatccatgcagacaacctggatggcacccaagtggacatcagccctcggctcccagtagggccctccctaccctgcgcagacaccctgggcttcctcccacactgcccccaggctgcggctcctgtgctcatctgtctctcccagggcccggcacaggcgtggcacagaggacgtgaatgaaccaatttgaacacatcatcctctgttctccttccccgcttaagccctatggttaacacattggcaagccctggaagatctgtcccaaaaatactgcctttcccatgtctaaatgcctctcaccatgtccactactatttgcaattttgtgtgtgtggaaatatttccacaaaattggaatgagcaggtcacagctgtgcctggagggaatggccggggaaatgtgccctcatcttgctgttctatccaggcccacccagcggaggatgggggacctgccaccactctcctggcagttccagactcctgggagccagcaggtgaggcttggacccaagaggtgttttcagcaacctggccgacctggtcatcagtcagtgcccccttggcctaagcctctacgtggcacagaccacagctcatcccatcgtggcattacactggcctgtgccctgtcctcagagtcacatccatctcccagaagccgtgcgaccctggaaaacccatcaacctgtctaacagtcaggttcctcctctgtgcattaacaatggcattgacgcctgctttgcagggcgctgggaggggagggtggggtgtatgctggagagctccccaagggcaaggcctggctctgcgccacccactgtcagatcctcagagcccggggctggtccagcacgtggccaccattccctaagagttggattttatccatcagtgctgaaggcaggggatagagcttagacagaccctctgcggcctttttttgtttatctgaagcttactcatctcttccccctttcacatgcagcactgcatcctgcagagcaggtgttcagtgagcctgaataaagttcagccagagcagctgatgtatgttgaggcctggattcattgtgaaagtgtttctcaaactgtgttctccagaacaccatgaaaaactcatctactgtgtaagttttggaatccctgcacacaagtctttccttctcttccagattaatgatgcacattaccacatccaagactctgagacatccaggagtggggaaaccgttttaacttttcctagactcccctgcacacaagcagaaaaaacaacagccatcccactgagccagtaccttggggttgaaggcacagctgaataaggcccccaggtcccaggccagcgcctctgattttcctgtctctgtcgcaaagaggatggtgactctgactcgggacgccattgtcttgcgcatcagcatacaggcaaagagcacagctctgtggggacagacagacaggcaggcgctgtgtgctgagtcagccttccagaagaaaatgggggaccaggggaatgggaggggacagcgtttaatgtggggcaggttgagggaaaagcaagctacgtttctcaccagccatgtaccgtgacaactcacccttttcctcccctcacccactactataggcccctttgggaaaagggaggagagagaaggttggaacaatggcagcaggggacccttggaattggcgactggacctctgggagccaaattccacgaagaatatacattcccaggctgggtgccgtggctcacatctgtaatcccagcactttgggaggctgagcaggaagatcgcttgagcccaggagttcaagaccaacctgggcaacactgcgagaccccgtctctacaaaaaaaacaaacaaaattagtcaggcgtgggtttgtacctgtggtcccagctacttgggaggctcaggtgggaggatcacttgagctcgggaagcagaggctgcagtgagctgtgatggcaccactacaccccagcctgggtgacagagtaagaccctgtctcaaaaacaaaagcaaaaagcataaccattccttgtgttcttgcccttcaaggactggaggcagaggctgactagaagggagagatatagttcacacatcactactagccactgccactgccactcacttgaccaagactttcaatggaatctctcttctcttgggtctccgcttctcgtcctgccagacatgggttttccaggcctctaccttcagaaaagaaaggagatgtgagggcagggcggggtcctggcttggctcagctcgcggatgctggagtggtagaggacccttcacacccatcatgagcctgggagagaaggctggcctgcgccccacccctgtcactgaactcccacaagggagggccgtggctgcctctcccccagagttgcctctccactgcccggcatggagcctgcacatcgagggggggcggctaacccttattctcattagtgtcctcctggaaggaacaggctgcactccttttgcttttagcatcttatcagcaggcagatgacataatgtacagtcccaaccgagacacctttgagagcaagaagagctgctactacaacaggcaagactccaggacatgccgtcaccctgcatgtgaggtcctgtagatggaggaagctcttcctttagatgaaggaagctcttaaaatccaacccaagtcctttttggcacaaaatgaactcttctcaatagctcatggttactgaatgcattctgcattgggcactgggctgagctgttccatacaccagctttgtgatccacacaaccccccgtcgtggagtgaagcccatcccttttagagatgagaagatcagggctcagaaaggtgaaaggacccacccaagaccctattgctaggaagtggcagaatcaatagcgtctgactcaggggccaatcccctcaacactctgctgagtgactgttgccgggccctcccgtggaagcaggtgtaatgacagaccccccatctgagccacaggccactagcggtgcagtggaagccacttccttcagtgccactctccgtggaaatgcacaaaggctgctcagcatccttgagtggggcctggaaagctctaacaacatactcctgcttcccgtcgtgccctacatgtgtaacaatgaggtgcacacacacacacacacatacagccacatctgagcccccaggaaggagagaagaggaaggcccctaacctgatagtagtagaaaggggacaggacgtagttcagcatctcctggtgaaacacgggggtgatgctcccagacatgggagggaccagccaaatccagtctgccgggcagcccccacgggaccggtattcattctgcatgtacttcatgaaggattctgcagccgagtggtggtccatgatggtcacattctgcttctgtatcagaaggcaagatagggagtggagataagggtgggggaatcaggagaggggccggttggccgcagggctcccagagagtgcctgggaaggcctggcaatctgtaacacgggagagcaactcctggccctctccttgcctgctgaaaataaacacccaaatggaaggcgcttgtggagcctctgacagagcccaagaaagcacattagtcagggtcagcccacaggtcccatgggggcctcccttaagtctttgagggcaatatccagcctctcatgcccacaggtctccccagactcccagcaaatggctctctctggatctgcataacttaaaccacagcaccttttggcaggtaaaggaaataccatcccagccatttatggtggagagttctaagagtcacttccatggggttgtagcctcctcagccaagaaggagccagacccctccgtggggaggtctgaagcattgggagaactgtagtgtatgggagacgaatcactcacagtctgaaattacgggctgtggggtctgaccccatggaatggtccagcaaggcagccactggcctctatgtctgtggcaacccattcagtcaagagacatttgtttaacacagtggttcaaactctggctttttatttgccatgtgaccttgagcaattagttctttaagttttctcatctgtgaaatgggagtgatatgaattcctataatggccaggtgcagtggctcatgcctgtaatcctagcactttgggaggccgaggtgggaggactgcttgagcccaggagtttgaaatcagcctaggaaacatggtgagaccctgtctctataaaaatttaaaaattagtaggccagctgtcggggcttacacctataatcccagcactttgggagggcgagacggggagatcacctgaggtcgggagtttgagaccagcctgaccaacatggtgaaaccccgtctctactaaaaaatataataattagccaggcatggtggaggcacacacctgtaatcccagctactcagaaggctaaagaaggacaatcgcttgaacccgggaggcggaggttgcagtgagccgagatcgcaccactgcactccagcctgggtgacagagcgagactctgtcttaaaaaaaacaaaaacaaaaaaatttaaaaattagccaggtttggtggcacatgccagtgttctcagatatgtgggaggctgatgtggtaagagcattgcttgagcccaggaggtcaaggctgcagtgagccatgattgggccactgcactccagtctgggtgacaaaacaagaccttgtctccaaaaaaaaagttcttacatcatgaggttgttgaaaggatgcaataagctggaataagcaaagcatagtaagtgcttaataaatattagctgctcttataatctccatctgccaggcactgcataaggcatcggcgttatagaagggaaagacacagccctttctctgcattagagtctagtctaactgggtggggaagccaaggaaaatcagtcattttcacacggcctgatagaaactctgatggaggcaggcaaaggtgctggggaagggcagaagagaggatacaacgccagacagaggcccagggtgagttggcgaatttcgggagcagctcctgagaggaagggagacttgtgagaggggtgcaagttagttgagtggggcactgcatgagtcaaggcagggaggcatgagaggatccagctggtgtcaggcctgggaaggccagccatgccttgtaaattcaatagacatacataagttatatatgtgtatataaaagtccggccaccactcttgtggacgtgggctctcattcacttattcttccaagacacagcaactcctgggagccagatcagttctaagctcagtggtagctacaggatgggtgcagtggctcacacctgtaatcccagcactttgggaggcagagacaggtggatcacttgaggccaggagtttgagaccagcctggccaacatggtgaaaccctatctctactaaaattacaaaaattagccgggtatggtggtgcaatcctgtaatcccagctacttgggaggctgaggcaggagaattgcttgaacccaggaggcggaggttgcagtgagccgagatcacaccatgcactccagcctaggcaatggagggagagttcatctccaaaggaaaaaaaaaaaaaaaaaaaaaactcagtggtagccacgatcatgatgacaacataataaacagtaagaaaatcattgcttactgagtgttgtctatgggccaggcagtgcagctaaacattttgcatgcatttttacttaactcttataatcctcagatgagggaggcactattatccccattttacagaggaggaaacaagggcccatcttttgaagtttaccctgaaggagggtggtgaggaagtcctggagacgctcaggcagtggaaggacacagtcagccacggtgaggagacagcagaggctcacagattttctgggacgtatccacatcctgccagcatcagggctggtgctgggagtccccaggagtcaggatgtgtggtgcaaagccagcccttccccaaacaccggggggctcttcctgttccatcttcccctcccccgtcaagcacaggcctgatctgcctatggggtgacccagtcatggggaacagtgtgtgctcatctgtactctgttcaccactcacatccttggcccagcctagtgcccagcaccaggcaaatgctgagtaaaacactgctgaatgaatgaatgactgaccagtggtggggtctccagggcatctgtcagctttgtggcaatggctgtggcttctaaagtagtatcttcctacatctcaggcctccttcccacagggaagggaagtgtttctatgagtaagagcagcggatgggcctgagggcttagccctacacaggagcccagcggctgtgtgtgggcttaagaggaggtggaggttgttatcctcgcacagcaagcaagagcagccacagctcacaggtcccctcccagcatcactcattcatgcacacgtcagacaaggactgaagacccagtttgtgccaggccagatcgcggatgtggccctcatcattcattcttcaaagacaaattattttagcatctaccatgtgccagacactcttctaggccagaggtgcagcagcaaacagacagacaaggtccctgccccatggagcttacattctagtgggggaaaccaaacaataaagaaagctggcccggcaccgtggcttatgcctataatcccagcgctttgggaggctgaggcaagcggatcacttgaggccaggagttcggaaccaacctgggcaacatggaaaaacaccatctctactaaaaatataaaaattaggcaagcgtggtatgcacctgtagtcccagctactcggcaggctaaggtgggaggatcacttgagcccaggaggtcaaggctgcagtgatcatgccactgcattccagcctgggtgaccgagtgagatgatgtctcaaaaaaaaaaaaaggaaaagaaagaagaaagtcgatgtcctatataatgccaggaactgtatgaggaagtattttgaagaaaaataaaatggttaaaggactaacacagagagacaggttggcagtggggtgagggcgtcattttacatggcacggtcagggaggccttcttttttttttgagcggagtcttgctctgtcgcccagccaggctgaagcagttgggggatgaggaagcacaatgagatctctccatagttttgctgtagaaaggagcagaagggtgaggcagtggctggagggagcctgaggtttggcaggagttatgtggttagctattcatttctttctttgaaatggggctaagagagcctgtctgtacactgctgggaatgactcagcagagagagagacattgatgatacagagagagaagaggaaaatttttgggagtaaagtccttgagcgattgagagaggacagaattcagtgctcaagtacagggattgaacagtcttgggaggtgaggagctgcctgttgctggacctctagagtgagcaagggggcttacttataaattaagcatcacataagtcactggatcagttaagcttctcaccaaaaagtcttcagactcacaaaactccagacatacctggaaactatggagcacagcaatgttgatctcaacgacagcctggtctttccagagcgaggccagcttgtgcgtttccaggcccattctcctgcccacttcctacagaggcagagtgatagcggcgagtcggtccctgaagccacccccaggcccacaccttcatctggccagctgggctggctgggttacctccaggatgttgtagcgctggacgtcacagaagtcccggactccgatctctgtgcccatgtaccagccattgaaggggcaccctgggaactccaggccgcccacctcaagcagcatgttggccactgcaggcagggcgtaccactttagctccagttcccgaaaccactcgtatctggcaaaaaggtagacacaatttaactggggccttccttatttttattttattattattttttttttagtgacttggtcttgctctgttgctcatgctggagtgcagtgcagtggcacaatcataactcactgcagcctttaactcctgggcccaagcgatcctcctgcctcagcctcccaagtagctaggactgcaggcatgtgccatcttgctcagctaatttttttccttattattattattattattattattattattattattattttatagagtctcactatgttgcccaggctggtctcgaactactggcctcaagtaatcctcctgcctcagcctcccaaagtgctggaattacaggtgtgaactaccttgtctggcgctgggggcttcacttttgcacctttggcctcccactgaccccccacctgcccaccaagaaaaaagcttcagaaagagtcaaacaagaaaactcctttccaagagttgattctgagttaatcccagccagagagacgtattggacacataggatgccatttattaaattatgcattcatgcactcattcattcatgcaaacctatattaagcttcaagtatgtgccaggctctgtgctaaatgctgagaatgcaacacaacagagcaattaaggactccagtgtcagaagctggggttcaagttctgcctctgactagcagtgtgaacttgggatgttttttagcctctctgagcctcaacatccccattatcagaatagaaacatagcatcaaattcatggaattattataaagctagtaatatcattcacttgtatattcagttattccacaaatatttataactgagcacctactatgtgccaggcactctgctagctgttgggtatacattgtgaacagaaaagaaaagatctccaccctcaaggaacttgtagtctaatgtctagactctagattataaatgggtaaacaaatatataagaaataaaaacaagatgatgtgttagactgagggtaagggggcctcctctagcttgagtggtcagagagccttctcagaggaggtgacattataggaaataccttttgacaagaagaaatgagcctagaaaaattctgaggaaaaggcatgtcatgcaaagggaacagggagtacaaaggctgtgagtcaggactgaatttggttcattcaacggccaggaagaagagcccagcccaatgtctgctacagagtaaatctcaatacgcagaggtatttttgcaattatgagaactgcctagagcaggggctgggccagtaggactcttgaagtcactgcagccctatatgatcccgacaggagagggacagctaagagcattggcaggagggcagaagaggcctgggctgctcctttctagaatctcaatgcattcctctcctgcagtcactgcttctcaagctcctggggccccatccgcctaagcctctgcttcccctcagcatcaacacatccacctgtctgaggcccgaggtgccagtgcagaatggctgcagaatgcaacagtgacaaaagagtccttgaaggccagccccctgagtgtcacctgctgctggctgggctttagggaaggtatggggaaggctggagccgcacttaggaaaggagaagggctgtgtgttgactcgcccttgcccccagcaccctcagcctacttacttgggatgttccatggccacctcaagcacaaggtcaggtgggatttcgaagagctcagggtcacggccattggcctgcaggaccagggggaccacatcgaagcggccgtacttgggcttccagcccaggtcgatgcacagctggggaacaagacgggccctgtgagtctgtaagcccgggctgcgtgtctcctctgggctccactctgtcactcgctcaccacggggctccccgccccaatggccggtggctgaggctgggccgggtacctgagtgaattccacgttggcagggtcccctctgatgctgccatctggcatctggtagccagcatagcggatgagctgagcattccacacccggaagtcgtgcttgccatcactccgctgggggaacacggtgatggccgaccttcccaggacaggaacagtactgtttaccacctagccctggtgggggcccagccatcctgcactggccctacctccctctccaccctacctgctctgcagcccctgatcccaagctgactgagccagcctcctgacatgccttctcctgctgccctccctcaagacccagggtccaccccctcaagggggccttcccatccatcaggcagggttagctgatctgccagtctttccctcactgcctatgtctccgtccttgcagttgagttagctggttgcctgtctagtgcaggtcataggctcacaccagctggagcagcatcttagggtcctagtcactcttcctcctacccccccataccccatcttccccctgctctcccagccttgtcctgtgttgagttgcattaggtaggcactgagtgtttgctgaacaaaaagatgaatgaatgaccaaatgagctgttcagtcctattagctttgacctcgttggttgggagaggaaggtaacctcttaatgtcccatgccttctaaaaaatgggagccccaaccctgaatagtgaagcagttacttcttaaagatcctccatcccctccaagtggctccacatcagaaggaaaccaagggcatgggttgccgatgggagctgagctcacaggggctgggctcactactggaagtccccgaagaagcctgagtctttctcttttttctttctccctggtttctcctggagctggagatgcctcccctagacccaagtgctgcatcttttggctaagattctcaggcaaggcaagcccctctgcagccctgggaaatgtgcaccgacctgatgttgccattgttggtggagtaacgcacgtgtctgcagatgtgttcaaacatttcccgggcagtggaacagctgcgggcatcgaagacctgcaacagcccatccagaccatgcccatcaaagactgggtagacagaggctttgaggctgatcagaagtcactgggaatcaatagtgcagccgaaacactcaacacacaaacactcaacaccatgccgaagagtgcagcctccaatctgcacctgccactcaacaccatgcagaagaattcagcctcccatctgcaccaccgctcccatttcatggctgccctctaggggagcacaggcaaccccactcagaagaccccagcaaacccagaattccaagaaaacctgacttgaaagcaccatgaatcgggattgccacagccccaggctaggtcctttcccacaccagcacatactacacagccagagttggtttcactggcagttctaatcgatttctctgtccaagtgcttttgatattatcctgcaacaaatgactccccaacaaaaagatggcctaggaggctaggctaaataaaatgttctcttggagccaagaattcaagcattggaggaaaacaacacatcttgcagcaccacggcctcaagtgtaataaaaacaaggtcgtggtttactctaatgatggcatttagtctcctgaatttaacacaatagagaatgggcagctagaaaccctggtgctgaaacaggattcaaggcttctagagagggaccctaggtgccccatctcaacatttgggaatgtaagagaggatccagggccatggcttcagtcccaggaggcctgggcacagctctgtgtggctgttccaagccatctgctcagggcctggccgcctccagctctctcccgctcaagtctaaggaagttcacctgcaggttggaccactggatcctcccaatgcagcgtggggcattgcgccaggcctgcttggtggcgaagatgagctcatctcccgtcagttggtaggttcctgttgtttctatctcctttgttaccgcttccaccctggccagatgttcctctatttttgccctgggggacaggaagacagcaggaagatcaacaatgagatggccttacatggggattaattcaatccacagaagcaggaactgaaataggacatcagaagggcaagatgcctctcaccagagacagctccctccagggctggctttggggacctcacacttagcctagaagcaccccacgctcaatgctctgctgtccccatcttgaaattcttaatcattttaaaataaagagcccacattttcatttttacattgagtcctataaatactacctagccagtcctgagcccatgggaacactgcttattttcaggtgctttttctttaatcatattcatctcagtaaggggtgcaatccttctcagacacttgcaagcctgggaggagtgtcccatccagccatagcaatgtcctgcctctccattagttagtagagtgccctccttccttgccatgactgagagatgagccagtccctccgtggcagctccggtgtactgggtacccacatgagccaggcactgggtgaagcaacccacaggcagggtctcactgagtctgggagggaggtatttttgcatctattttatagccaaggatctcaaggctctaggaggttaagcaccaggcccaggaacataagtacaggaaagagcaaagtcaggactcagacccaggtcgccctgatgccaagcccaggttcttaactgtcagcaacgtgaccttccatcttccaccctacggggacagtaagcccaaagatgttgagggcctgcccacccttctcaggagcctggtcaagccaggactgggacctggctatcggagctcagtctgcagggtcccagggcctggccagaaaagagctgcccacgtcatagtctctctaaaccgtgctgttcctcagcctcagaattgctcattcagtcactccatatgcaattctaaacttgcttctctcctcccctcccagacttcaaaaatatcccaaagggagggagggactcagtcagaaaggctttgaaacacacacacacacacacacacacacactaccaccaccaccaacaacaacaaccttgagatttccagtcagcaccaaagccttttgaaacagcatcaaaactatttaaagaatgaactcctgattaaggagagtgggtaactctgaacaaaatggcctttctgtggatgaagagtgtctcgacaacttttccttgattagagaaaaaaagcacaaagacaaaacactgatgatatttatccccaaggacacccctgccataaggagctgctgggtgaggtgggaaccaccccactgctgggagacctccctccccaaacaaagcttccagcaatattcccccctctgcacctgagcatgacaacagtaatgatcaccataacacccacaccaccaacacacatggtggtcagcacgtgcatatgcaagaaaggattattttttacattcacatccaattccttcagagttttagatgtgatagccattttcatatagtcattttctaaggcattagaaatgctatgatgtctatgagctctgaaaaaaaggagtggctttcatcatcagtgaacagatttaaatgtaacatgcagcaagtcacaatctctaaatatgctatgattcttcagatacaaaaggccactgaacctgctcagctggtcatgtcttagattgccagggtccctgtgaggagaggctgccattccccgttcacacccccaggttctcttgctcagggaagcaggggttcaaggtatgtacttgtgacttggaaaaatacaattttcctctgggagaagcaaatgggttccaacaccaccaagcatggccctgtagccctgctgggcttctgaacacccgcccaattgccttccacacaacagcaaggcctcccacgtccagaatagagttgggaacctgcaaggccacacagctaggtactagagcattgatgggaaaagcaagggctcaggcaccagctgcctaggttcgaatccccactctggggcttcgaagggtgtgactttgagcaaggtacatctcttctgtggatttcagttgccttgtctgtaagatgaggataacaataataccaatctcatagtgtcatggtgcacacgtgctttatgctaaataaataaataaataacataagtactgtggcccaatgaaacccatccaggaaaatccctggaccccgaaaggctcattaattaacaaccgagctgaaaggccaaggatcttgtgaagtttgcagtcaggaagcaggcagcccctaacaggctgctcaatccaggctgtgcattagaatcacctggggagcttttgaagcacacacatgtctgcctcatccccatctccccagattctgctgcccttggctcaagggaccctgccatcagaattttgcaggctttccaggtaagtctactgtgcagccagggttgaggaccaccgaccctggaagatgagggcctcttctgaagactcacggtccctcccagctcagacattctagggttgtagaaaactggaggtgggccaggtgcagcggcacacacctgtaatcccagcactttgggaggccaaggcaggaggatcgcttgagctcaggagttcaagaccagcctgggcaacatagtgagaccctgtctctactaaaaatttaaaaaattagctaagcatagtggtgcacacctgtggtcccagctcctcaggaagctgtggtgggaggattacttgatccaggagatcgaggctgcagtgagcagagattgtgccactgcactccagcctgggagacagagcaagaccgagtctcaaaaaaaaaaaaaaaaaaaaaaaaaagacaaagaaaagtggaggtggtaccaccagaagccactctttccgccagggagtcccaggtacatgtctgtggctcactttgtgtggtgcagtgctgtgtgaggctctcccctaatagcaacactccccttccagcctagaaaacaatccatttctgggccgggctcggtggctcacgcctgtaatcccagcactttgggaggctgaggtgggtggatcacaaggtcaggggattgagatcagcctggccaacatgatgaaaccccatctcaactaaaaataaaaaaaaaaaattagccaggtgtagtggcacacacctatagtcccagctactcaggaggccgaggcaggagaatcgcttaaacccgggaggcagaggttgaagtgagccaagatcgtgccactgcactccagcctgggcaacaagagcaaaactccatctcaaaaaacaaaaataaaaacaaacaaacaaacaaaaagaaaacaatccatttctttcagacattctttcttacaatctcttcatgcatttttgttttaaaagttttaaaggggcctaaattacatagccacatattttatttggacaacgcagtgttctaaaaacatgaaaatggctaatacttatgtcgtgcttactgtggcccaggcattgttcctagctctatattctttaactcctttcatctttataaactcccgccaactaccctcctcctgcaaggtgggtactattattatcaccattttcggtaagaaaatcaaggcatagagagacaaagtaacttgcccagggttactcagctcgtaaggggcacagctaggatttgaacctgggaaggccacaatgctatacaacctctctttggatgattaaaattgtatacgttggcaataaaattggcaaatgacaattaaaaatctttgtattccagtgtctgacacaaggctgaggcatactcagtgcctgatgtgtgtctgtcaaccaaatgaccaattggccatagaaatgaaggatgtctagcatggtcctcagggaagcctcactgggtagaaaaaagaagagaactccagaaatgtagaaccccaccagggtcagggcaaagagcaatggcctgccctctcctagtcaggtggcctggcttctagctggaatgaggtgacttcaggtatgtcaccagcttccatgttcacacctgtaggagtaggggcctgactaggtggtctcagagatcctttctgtctcaaacatttcataattaaagggtccatattaattcacaatcaaggtctctggatgccaggacactgttctgaacttactgaatcctcacaaaaatctcatgagccaccttctgttattatccccattttatattaggttggtgcaaaagtagttgcagtttttgccattaatatgatgaggacgttcagacacaatgcgggagccagggttcgaattcagtcacttttaactggtattgctatgtacaacgttatcccacaattatgagaacctgctccagggtcttctcccctagaaaaccgtgattttcgctctgcaaaatcatagtgatttaacaccacaaatctggaaagaaaagggatctagctaggatcagagggtgatgggtagagacaggagagcaggaggaagggcaggaggcagcgaccctgcaggaggcaagccttactctttgaaggagccgtaatattggttgacaaattcgatagcttgaggtagaagctcatctggaggggtaggcttgtccctgggtcctctggtcaaacttttgggagtcataatggaccccaggcaagatttggacctgcaagttaaaatctggaaagagagaggcaggtggtgagggtgggccattcggcctcttgccaccctcctctggggccagctctcctggccacctggctcctctctggctgctccggctccctgcacctcttctccacccctgtggcacctcctccttggggtccacctggctttctcccacctagatctcctctcttccactggctgaaccccagtgggtgtgagtcaggtttttctccctactccggactcagtctctggccctgctccccagccagctccagatccagagcaaagtcaatccaatatggctcctatgggaacatgatattggtatttggccaaaacaaactgaaatgagacataggaaggcacacgcgtgcacacacacacacacacacacacacacgaatgaagtacacccgaatgttaactgtggtggtttgggggcatgtgggaaataattttgctttcatggtcctgaaattgtccattctttcccactttacaaccatagaatgtatcctgaagttagaattaaaaacttacatgacagaaagaagcctgaaaagacatttagtccaaccactcacaggatacttgaacccctctgcaatctatcaaattgcatttaaatccttccagtgacagggagctcactacctcctgatgtaatacagtccagctctgagcagttctgttagaaaattctccctgacattatcctgaaatccggctaagaaagatatgaatttgtttctgcaatcatttatttgaccttctggattatccattatttactggggtggttaacagggagttggcatcatttacttcctactgtaatctgtgaggaatgtctctgttcctagacccctttgcccaagcagatgattgtttggtttgcccagggggacacctgtttgatccacaaagccctggcagcttcaccagcttgggacaaaggtggttctccctgaagccccagacttacccctttggccttatggtgaagtgtgtcttggaaagtcatcccgctgccccagtttttgatcctcacatgccgtggggaggacaatggggttgcatccagcttgaccagagattctggagacttctgcaaggggaaaaaacagggttttctctcaggtctctcctagaccccaggccctgccttgtcttagagtggggaaggatctatgggtggccacacagggcagggtgtccctccacgtccctcctctgtttccagcccccgggcgacctgggccagtgcctgctaagagctccaggtgcctgggccactggccagggtcctctcctcacccagggccttgccaaatgcttcctcagaggaactgctgtaggagggactaaagactaagttggaggtgagaaggatgactgtcagagccaatactactgagaacagaaaggcaccactgcattccttccctgggagcatgtaaggacatataagccaccctctctcccactcctacccatttctctgcccacctctctagaatggtatggaacccaggagatagaagctagctgtcagtgcaccttgggggccaccactcccgaccactgggggttgtctcactctcccaaagcccttcctcattcccacctgttccccccaacaccccgggtctgggactctccactctccatccaaaccctggcttcctgccctctccagcccagctctaacaggctgctatgtctgcatctgcctggaccagggaggaaggggcttcccacacccatgtgactcactgacctttcccgtctccacgaggggctgcggggactcattctgctgcttgctgaggttgtgatactgaaggtcatcctgtgtcactggactgtgaaaggaaacagctagcatgagatgcggtatccaagggtggaggggcatcttggagttccctctgccagtaacctcatttgacaaatagggaaactgagtccagagggtgggagtgaattgttcatggtcggtctgaccaactgcctccccatccccatcttccctcttcctcttatcttcttcctcccgcagagccaaaagggcatgagcagagctgagccaaagctactggcccaaacagcagcccatagaggatctggaaaatgctccttcaccctctggaaaagccaagtacaaacgtggcacaggggctgggtgggcagagaatggctccaacaactctgcctcccagactagcagcactgcccagcagccacttggattggttgactgattgactgattgatttatattttttgaaacagagccttgcactgtcatccaggctggagtgcagtggcatgatctcagctctctgcaacctccacttctcaggttcaagtgaacctcccacctcagcctcttgggtagctgggactacaggcgcacaccaccacacctggctaatttctgtatttttggtagagatggggtttcaccatgttgcccaggctggcctcaaactcctggcctcaagtgatcctcccaccttagcctcccaaagtgctgggattacaggcaggagccaccgcgcccagccccagccacttgtttttcatgacttaagctttatttaaaacacgtgatttatcttggtttatttacttattctacatttctattacagaaaatgttaagtgtacaaaagtagagagaatagtctaataaccttccatgggcccttcacccagattcaacccaattcaacagtgatcaatccacggccgatcttgtttcacctataccttccctgcccccatcattattttaaaacaaatctaagatgtcaacttaccttcaccaaggtaaaaacaagtattgtaaaaattagcattaaattacagattacttacaaattaaattaaacattacttaaagtaattttttaaattaaagattacttaaaaattcagtattctgaaaccggtcagaaaccgtttgtcctggtttgggatttcaggttcattccggcgaactgaatagtcaccactcacacatgcctcccctaggaagaatcatcccaccagggcaccttggtttgaaagcatattgtgttccatgttcttggcagtattttccagggtatgcatgcttgtgcatctgagggagaggtggttagagactattatgagggtctcacattttctacttgatatgtatctatgatgttgaaatgcgataaatgaccatgtattgcttttattatagaaaaaaatgactatatgttaccattatatcattaattatatacattacatagtagcagtaagtgattttttactataaagagatactgtcttaaaagaggatgtaagtatgtatcagaaagcaacttatatctgaatcaagggattccacaaccctgtaaagggccttccatgtgaccaaccattgccaactggcaaagatgctttgcttagccaaactttactcagacttctgaatcttctgcggggcccatccaagcatttccttgtaaaaatgcagttttagcaaaagaatccctacttagtcagtttaacaagaaccctccatccttgatagcttgtcgtcctccccatctgatcagggtcctcatcctccatcctcccccaggcgatgtctgatcaccttagcctgtcctaagcaagaatcctgttaggttgggtgaggcagaattccccctatgcctgaagtttttcttggtaattttccatccacagaccccaccctgatccttggctataaattcccacttgctcctgctgtatttggatttgggcccaatctctctcctccactgccagaccccactgcagtaggtccctgtacctattgagatggtcctaaataaagacttccatactgttctttaacaagtatcattgaatacttttttctttaacacacctggtctagactggtgtggcctgccagaaaaaaacaaaacaaaacaaaacaaaacaaaacaaaaatatatatatatatggcaatctggatattcagaacagataagccatggctgagcagtcaccatggggctgcttcaataggaagatgtatgggggatggggtccccaggggacaactgcccctcttgctcttttgccattccccctcaccccagcacccaccctgcacccattcttgcttcctctcacttacttctggaagtagagttggacaatttcagaagcttcagaccagaaacatctacagtactgtttagattgagaagcaatgtctttgtacatttaacataatcattttaccccatatattaaaaagtatcacttttaaaagttggctaaaaatccactctacagatgggccacgattagcctggtcccattgtccatggctggatgttagactgtgtctagttttgccctcatataaataatgccttaaactgtatacacagtctgatgctggctgtgtgtgtgtgtgtgcgtacaagcacagaaaaacacctcgagggaatgttagtaaatgttaacagtgactagcattaagtgataagatcataggcaatttaacttttcttatacttttccacatcttccaactttttacagtgacaatgaattcctttcataattggacaattctttaaatttgaaaaatgaataaacaaagttttgcccaagtcccctcccacaccatttcttctggctggctgctgggagacagggtgacagggtgaccagactccaggtgagcaccttcagaatctggacacttctttccaaattatcacattgttgattctgaccccgcagacgctcgtgcaatttgactaaacccacagctgtgcggggtcctgaggaccctcaaggacctgcattcaaagagagtgctggcagctgggcgcggtggctgacacctgtcatctcagcactttggaaggccgaggtgggcggatcactcgagcccaggagttcaagaccagcctgggcaacatggtgaaaccctatctctacaaaaaaaaaaaaaaaaaaaaaaaggtgccaagtgtgtggtgatgcgcgcctgtagtcccagctactcaggaggctaaggtgggaggatcacctgagccctggaggtggaggctacggtgaaccgagacggcgccactgtcgcctgggtgacagagtgagaccctatcaaaaaaaggggtcgggggcgtggggagtgctgtgagtgtggtggcttgcttagacccagaactttctacaagcccttgaccagccgagccggtcacagctgcagactgtggcttgcctgggctgacctgggggccagattcccctgcggttccgacgcctccctgcctgtttacctcgccttacaccaagagtggtggtggggacagatggggagggtgggggggatggcgccctgggaaatggatctcatttgtgaaacaagaacctccttgctctcttaaccatatttgatccaaagagtgtagcaactttcaaccccagtgctgaaaaatttcaaaagctcccaagtgctgaaacattcgcagcgcaactgaacccgcatagacgcctctcatagtgcatggggggtttctctgggccgcctgggctcctgaattgcgacctctcaagcgttctaaaagaggaaaacgcttttagtaaaccctcaggaatcccacagagcgcacatccccgccctccgatttctcccagagagagatggggccccgcccgggctcggagcccaccgcttccctcccagggcggacttcggcccgcggggtacctggctctgcgcgggcagcagtcaggcttcggccggaggatcctgcagagcagcctgcacagccggggcccggcggcctcgcacgccgcgcccagcccctcgcgcatggcccggctccttaggcgcagctccgctggctccacgcgcctcccagcgcccgcgctttatcgctcggagcctgcagcccccgccccgggggcggggcgagccgagcagcggcgggggctcttcacccacgcgatgtcccgggccgagctgcccctccttccctgccttccccggcgatcccgggacccaagcacccaggggcccgcagccggcgtctgccgcggagtttggatggcactggactgtgtctgggctaagatgcccgggtcgtgttgggcctcgtgtttgtttattccccataaaatcgcaataaagcttatgataattaccaccattgcgcggtgctttctagtttacagagcaaatttcctttctgtcatttcgtccagtctcgttaagcagacagctctacgttgtcatctccactttattgaggcattagctggggccagagagattaaggatcttgtccagggccacacagcagccccaggaccacagcccagcctaagctcacaccacctcacaaggctgtcccgggaagtgttatattacttgttacatacagcatgttctgtgcgattccagaaaagaaaccaaagaaagcactgggttaggggtgacttctagtaggaatattgcaggagggatcgtaagccccttccggtgccttgcaggccccttgtccttgctacctggactgcgcagagcctcctgactttgctccgcctgtaaggtgctccttatctcaagcaagataacaggtagggtccagacccagatggggcagcagccctggacctcaacatgcagggggcccttctggcagtatgcaagcacattaaatcccgaaccccagttaaagcagaatgaaagagggcacatatttatttctagccaactgcagcccagcaagcaacacatagctcgacttggttctgaattccatgtgtcttcacctagatgctcccacatttgcctttgtccctaaaatacacacatgcgtacacacacacgcgcacacacacacacacacacacacacacacacaccatgctcatttcctaattgtttacgaaggtatagaatcaccagtcacttagaataggctcttggtttcatgacacctgaacagattagaaaattactttttaaaatcaaaatatattcattggctctcattgctttcaggatgaaatcccctttgcacggctgcttcctcttccagtaacatcacccctccctcacctgagtggatgttgcactctgggtggacccacctcctccccccaactcctccccacactacagcctgcccaggcacctctgcagtctccccagcagaggcctctagcacggtcccagtacacccacaactacgacctcctgtctacactccatcccacctactcctgacacaatttctccaactcgcattcttcatgtacgtctcccaaaccagcgaggaagacatccgtttccccgtttccttcctgacagcaggaactgggtcatttttctctgtctcttgaacagtgcagcacacagtaggccctctgggagagcacagatagtgtagatgttatgagtttggacttgactcaaaccttagctccactattttccaggaattgacctccagtaagtcactcaatcttgtaaaacaaggataatagttcctgtctcattattgacacagtactaaggaccttataaatgttatctattgtttttagcagtggtgtatgtaagtaataagtggctcaaacaattcactgatgagcagaagggtttcattgatatcttaactcccagcacagagccaggggagtgggcatctgcatgtactcgtcaatggaatgtgacatgcccaggacacaaaggtggcagccccatgcaggggtccctctggactgcctggatctgaatcccagctctgtcatttgctaattatgagatcttgaaaattactttaactttctgggcttcagggtcctcatctttaaaatgggataactaaaattccttccttgtggatcgttgggagagttgaatgaattgatgtgtgatatttttttcttcatcccctcttctatctgactggatcctttccgccagcccaccccagcatgaagaggagggggaaaaacatggtcaagttagctggtttgtcacatgtccactgcagctcagggccctccctggagtctgaactcatatttcctgaatggtccaaagacacaagtcagcccccaaagacatagggataactggcaatgctattagagggtgtggggatgagggttaaaggctgcagccaacaccgtaagggttttgggagattcagggtgatccggaaagacagcagatagatcactagggcccagagttcgagggcagcctggacaacagagcaagattctcagctttaaaagagagagagaaagagagaaaagaaaaggaaagaaaaaagaagcctaggtgcggtggctcacacctgtaatagcactttgggaggccaaggcaggagaattgcttgaggtcaggggttcgagaccagcctggccaatatggtgaaacaccgtctctactaaaaatacaaaaattaaccaggcgtggtggcacatgcctgtagtcccagctactcaggaggctgaggtgggagaatcgcttgaacctggcaggtggaggttgcagtgcagtgagctgaaatggagccactacactgaagtctgggcaacagagtgagaccctgtctaaaaataataataataaaaaataaaaatagaaaagaaaaaaataggggatgagttgggtctggatgagctgagggaggaatgtgctatgcacaggcactggggagctgaggaaggctgggatgggcaggtgggatgggctctccatttgggtagggtgctcgctcagaactctgtggaagctttaatgtggtgacaggcaatggggagccactgcaggctctagaataggggcgtgacttgctagaagtccagttggcaagagagagctcagagccagtgtggggagctggagtcagggaggtcagctggcagcggctgcaatgatgagatgaagagaaggaaggggcgaagccactgcccctctacagcccttagaatctggacatctagaggccatcaactctgtgttctcacctcttggtctcttagccacctcagttgccatagcccagactgcctggtttcaaagtcctctcctccaattcacctaccacaccacagctagactgtcctgctcaagaacctacaatggctccctactgccagggagagcgagtccaaatctcctaccctgcattcaagcccttgtgctctggcctggctttgcctatcccagcccccagcccactcctggccaagcacagtcaggctcatttctgcctctgagcctctgctcacctctcccctcttcctgaatgtccttgctactcctctgcacctgtctacattctacccatacttcaaaggccacagagtccacctgacttctgtgaagcccctagagggaactctgttcaattttgctccatcacctcctaactgccaacaccaccgctaatgatagcaatgccaacagtgccatttgctgagcacttactccaggccaggccctgtgctaagttgctcacatgggaaagctcatttactccttcctccaactccaggaaatcaccattgttaccctcttcttatagaggaggaaattgaggctcagaggctaggggacttgccaaaggttacagggctactgagtggcaaagccacttgctcatccccaagcccatcctcttagccactggcattttttgccgcctctgacagatacactcagggccgtcatgctgtacacatccagggggcgccctaccctttgtagtccatgggaaaggctcctctggggcggtggggttgtgtggctatgtggtggtcttgtgtagatgggggctttggtttcagttgcactattgcgttattgcagattgctttgtctttccacctgagcgagcctcaagcctgtcccttgacttgttcattaactgactcattctcttggttctgccctgggaggaaggatgggcccggggaggagggacatgaagaatccaaatctgggctcaagttccaactctgtaaactctgtaattaccggtcattcaggctgggggaagtcataatcctattagagcttctatttccttatctgtgaaatgagtcaatcatatgaacttcaaagagccgccacagagatcagttgagatgcaaagtctgtcaagtggcctgtgtagctctggcaagggcaggtactcagtagatggtgatgaaccctgatgtggactaagtgtctgttctgtgtgggcacagtgctgagtgctgtagatctcatttcatcctcagcacactatggtgagggcccccttgggttcctcataccacaggtgagcactaagtttcagagaggttaacttaccctgcgtcacacagctggctagaggcagcacccggcaactagtgcggccagcacagggcttggaactagtttgtctaacatcctgatgcccttcaccaggatgatattcaaagcatctagcaagcggtgaattggaatggacgcaggccaggatgctgaccctccacccccacccctccgccatggtgcccaccacgaggctctactgcctcccattctcaggccaagctccttcccatattcttccccaaagattccaagcttcttcagggccagccccgcaccatgtcccttccttcttcacataccgtcaggcacagcgaggtgcccaataatcagcggctgcattgaattccaacagggactttcaagaagcaatgaggagatcagacctcaggtgagagaggaggagcagagagaggaattctgagtcatcggtgccgacagggcatgggtgcccaaggagacaagcaggaggttcccccagggaaaactcacctggaggtggcacagggggctttctccacattgttgttgatgtctttttccccattcattgcatactggtggaatttggtcttgaacagaaatttccaaggacaggccatctctatggctttacaaagcaggtcacttatgtcacttatctggatttgagctcagatgttcttcactgtggggctgaagaagggaagcagaggtgagggaaggttgaagaagagtttacagaacagggcttctcagtggggttggctcactggggaatcgatatgaacgccagcatgagccccttcatcaatgctttgcaacctctgtctctatttcggggttggaatggggagccttcggacacagacttcaattctgtaaagccacctaataatcttaaggaaaaacaatgaacccccccatccccatcgccacttaacaaggacaaactgtatgcaccatgagcctccttagcgggacctgctggcccaccagacccagccaggcttcatcactggccacaggcagggtgaggaagagcccggaggtcgttgaaacaggggtgcctttgcctgaccctgaaagacacttcccagcagctctcattatcaactgtagttttaggtctattactggggaaagcactcaagctgtagctacctttcttttaaagattttgcagttgttgttctaactcagcattattacttgctcctcttttattatgtggggaggaaatatttgtgaaaaatgcactcatccctcgaaatctgagatcatctcctttgaaacagacaagaggaagatcaaagaggcaaaaactctgtctttagaagacagtgtagtgaatatagtccatgtaagaattttaggccaagtgcagtggctcacgcctgtaatcccagcatttcgggagaccgaggcaggaggatcgcttgagtccaagagttcgagttcagcctgggcaacatagggagaccttgactacaaaaaattgaaaaattagccaggcaggcatggtgtcttgtgcctgtagtcccagctactcgggaggctgaggcagaaggattgcttgaggctgggcagtcaaggctgtttccaaaaaaaaaaaagaaagaaagggaagggaagggaggggaagggaggaaaggacaggaaggaaaggaaggaaagagggaaagaaagaaaagaacttatagccccatagacctgggttcaaatcctggaatcctagctctaccagttatgtgtcctggatcaagttatttaactgaaactcatttattcatccataaaatgggtttaatatatccatcttaccaggatttgtggggaggttacatgttataaggactgataagataatctctgttaaaaaaaattcttagcagatacaaactcccattttgaacttttcagaaagtttttccttgtcatgtaacaaccacagctaatatttgcagaaaagaaatctgaccaagatgccatgttcaaatgaccaaacctcatgtcggcatttttttacctagactttccaacaccttctctctgtaggcagaaaattcccacaattttctgagccttctcaaagaggaagaaacaaaaccctctcaaaacagccgcttccccagaaatgaaggcaactcaccttgcagctggctgcactgcctccccggggtaaggacagtcaaaccaggaagagacctgtgccttgagaacttcgggactgtctagaactgcccagtcccctcatcaaaggtggccgagagattttaaagcaggaatgaggctgagttctctgcggccggagcctcagttttcgactcgctacaaagttatgaacacactggcagccaagaagtatttatactcaccccatgccatccagagagttgtttttgcataaaggtctcttttttttttttttttttttggtttccaaagggagtgtccccagcttgtgtacagttagctaatttatgactgtgactgccagggcctgtgggtgacctgatcttgctgttacatcactctgtgtggtgcctcttcacccaacccacctctttctggtcccaagtccaaggtggcagttcatcagcagggtggctgctaagatagaggcaccacggagccaggttttatttggccaagccacatggcctcactttcagcatctgggagattttttcctcagcagggagctctctggttaatccctgtccatcctctcacttttccagcttgtgacaggagtccaggaagctgggggaatattgacagtatggaacacactggaaaatgcccaggttccagaaggccagtgatattagatgatgccattattccagacaggcctctgaactagtcacttgaggtttttggaagggaaaggaaggaaggctattggcacagagaggcctctgagatgttggtcttactaacacctcatcctttagcactaggtaagctttggtggaatggcaggtaggattaaattccttcccttataatggaaatgatcacttcttacatgaaaaagtggtaatttcttataatttcatttcatttattttatttatttatttatttttgagatggagtctcattctgtcaccaagactggagcggagtggcacgatctctgctcattgcaacttctgcctcccaggctcaagcgatcctcccacctcagcctcctgagtagctgggactacaggcatgcaccaccacacccagctaatatttttgtgtttttggtagagactgggtttcaccatgttgtccatgctggtctcgaactctgaagctcaagtgatctgcccacttcagcctctcaaagtgctaggattacaagggttagccaccatgcccggcctataatttcattccttataatgcctgaaatacagtattcccatacatatgcatttttccatcataaaagtaaaataacaactacattagggagaagttgagaagcaaagggaaaaaaagtcacccttgatctcaccgtcccaacactttgctaccactgtccactcatttccttcttgtctttcccaagttaaattcagcataatatattaactttgtcaaagataaactaagagccacaaaaaagacatggatatcagagctcaaggatctttgttgagtgaatgtgtggatgaatgaatgaaaaataggagtaaactggaatgagttttaacatatcaaagccatcttcccttcaggcttcagctcaatgctgcggctcaatgctgcggcttagagctctggcttatggagcatctgccacgaagagcaatgcattttagaaagtgacaagatggccgggcgtggtggttcatgccggttcagttcaggtaaacagcactcagggaaagagtcagaatcctggccttagggagtgcaaggcctagaaaaataaatggataattatagtacagagtgatatctgtagtgatggagggatggtatggtgctgatgtagctggttctgccttgttcaaggaaagtttacaagggagaggacaccagggcagggttttgagggatgattaggagtttgctacactctattccctgtagctgctttcacatattctggctatacctgcagcaaacacatgtattaacacatttaatgcccccacccaagagcctctgagggggatactactatttgctattcatggaatcctcaagaatcccatctacttggcctcaaagcacttcgttgattttccttcagaaaatgcagttattcagttatgtgatctgtcaaacatgtcacctcaggtgcccctctaacacagcgtctgcttggtgtggcattcttgacctgtggcagggtttgagtccaagcaccaggcttgaggacacatttggaattagccagctgggaaggaaatataatttctcctcaatcatcttaagttatttgttgggaaagacactgtaacaaaagacagattaataatagagaaaaaaaagcaagtttgttaatgtctgtgatgcacaccacgcaggagaagcctcagtgaaagtaactcaatgctgcggcttagaactctggcttatggagcatctgccatgaagagcaatgcattttagaaagtgacaagatggctgggcacggtggttcatgcctggaatcccagcaatttgggaggctgaggtgggcagattgcttgaggccaggagttcgagaccagcctgggcaacatagtgagatccaatctctacagaaaaattgaaaataaattagctgggtatggtggcatgcccagctactgtagtcctagctactcaggaggatcaggtgggaggatcaattgagtctgggagttagaggctgcagagagctatggtcgcgccactgcaccctagcctgtctcagaaaaaaaaggaaaaaaaagagggaaaggaggaaaggaaaggaaaggaaaggaaaggaaaggaaaggaaaggaaaggaaaggaaaggaaaggaaaagaaaggaaaggaaagagagaaagaaagaaagaagagaaaggtgacaagacgaatgcagttgtaggcttccaggggtggcaagctgtgagaaggtaaacatgtggaagtgagctaaggagtaggatagcaaggtttgtttgtatttgtagatggctctggtgccatctctgagctgataaaagttatcttctcatcttgatgctgggaaagcatctttctccaaggaatgtttatggcttgctgcaggcaggacagggcagttcagatagccctctctctagctgctctttctcaaatgccttcagctggagataatcaggatgccatatcggcatatctgggcgtggcatgttctggtttcctttagcctgaaaggtcccaggttcgaggcacagcttcactgctgacctaccatgtgatcttggaaaagccacttctctctgggcctgacttttctcgtgacaaaaggtgataaaaataaaagtaaataaacgagatacaagaaaatgctttgagccattgagcaaaaagtcagccaagtaagaatttattatccttgctgggagtcagagagtaacaatttcccttttgacaaagagcaagtggatgccaggacttgccttctgaagtatccttcctcagacaggtccccgtcccaccacaaacacctgcttttaaattcccggtcctctctctccctttgtaacattaaattcatgtatgtatttttaatttttaattggaataaatttcacataacataaaattaccaattaactattttaaagtgtaaaatgcaatggtttttagaatattcacaatgttgtataaccatgaccactatcccaatcctctcttaaccggcaaataggaagaggaggagagtaaaaatagtgataatgattgtgatgatacacagaggttaggagactcaccaaggtcacacagcaaacagccttcaagccgggacaaacagtgagcttctggtaccctccccagagcgcctgtctgcagggtccagggctggccccctcctggaggttggcaagtctcctacggcttcctgggcctgcacggctgccttcttcttggccctgcccacccagcaggccgcattcctggcctcttctgatgatggatgcagcaggtgaattctgctggggagaaatcaaagagcaccttgaagggcaggcgggggacaggtgggccccccggagggtggcgatagaggttccgaggctgctgtggagaaatgccctcctccctgccttcccaggctgtcctaggcaccatgctgacagcaatcagcacgggaatgtcttgggctcattatcctggaattgattttccactggattgatttgatctgtttctatgccaggctgtgaagatggttcagatccagttagccctcggaagttagcaactttgaaggcttttctacaaaaacaattgatcagagctaacgtttactgagcaaggcacttaaacataccaagcatttaatccacacaacagtcctatggggtgggaatgatcactagccccattttatagatggggaaattgaggctaagcaaagccaaatgacttgtccaagaccacacagtcaggtggtggcagggctacaaccctggagtcccagcttgcacttgctctggtgcttgctccataaatacagccaggccctgggctttccatttattatctcagttaatcctccaacaacgttgtgtggcaggtactattataatactatccccaattcaccaataaggaaaccgagacacagaaagtttgagcgaccagctcaatgtcactcagtttgtaagtggcaaagctgaggactgacccaggtctgagaccttgactggaccccacttgtgcgcccactgtgtgcttacccattttgctacaggtgagtacacccaggggcaaggagaggtgacaatgagagagtgggaaactgagatcaaggtaggagctgaggattacctggggttgaatgttctcccctccatgtcagtgtctggtgccagctctgtgcaaggccatggaaggaggagacggagttcctactgtgtgccccgcctcacagaaagtgataaaaattttattttagaaatatatttaaggtttaaagagagccagtttaaggtaaaatgtttaagcaaataacagtataggtgcatgcagatgtgacacaaatgataaaggtgggacgtgaaggaaacacaggggcgtggctcttactctctatttgtgtgtgtgcatgtcccgtggcgagtcacgtgtcctgtggggccttcactccactcagctgtcaaaggaaggcattgagaagaggcattcctgggaccctcccggttctgaggccctaacaagctcaagtccccagaccgtgagccctatgtcatttgtcaagtgaccactggagggcgtgagtcacacaaattccagcagctccgaagctgaggtcttccccggtttccaccaccttgcctgactcggagatgacggaagtgaagtgaagggatttttactggaaacgcccggtggtcactccaggatggacaggcccagggtggaccaggaaggtggacaagctttgctgagtccctggagtgtgactcaagctggctggtgcaggcctggcactttgctgctgtttcttttaaaagcctcgtttcttgtcaagcctccccagaacaccctcccttccctgccctcccgttttgcttcctgggtgcccgtccttctaggcggagaaacaacaaacagagtggcacctggggtagtcccagggtgtgatggttcaaggggcaagattcaggggcaagtagtgtatctgggaagtgcaggggacatcaggaggggaatgaggaagtgagacagagaaagggaggcagctggtaaaagtactatagggcagctttcacgatttgcaaccagactcagccccaccagggaacttgaaaaatggtgcagaaaacagggcttcaaatgatcccatccaaggggccaggggctgggctactgacccagcagttccagagcatcactcattgaggctgctcccagggaggttaaattcccaaggcctgctgtgggcagagcagccttccttggttctgggaaagccctctagaattcacaaagtgcactggaatgagacgaagacagacgtcactgctacagggggtttagaattgggtcaaatggaggaagagaggtacctcctccccaggtacagcctctgagggtgctggatgctgatccaagaagttctaaatgccaagagcttcagctaagcccaccctcttgtatccttccctaagaagcgctgcatctttggttaggccacataagccctccgggcctccctttcctcagttaagggtctctgaggcctttccagctgtggtatctgggctttctgagtctccccacctcatacatatctggtctttgatgctcttggaaaagttatcttccccaccagagtgcccctgaaaggcagaatgtagcaacgactggcaacttctgcagagcctgaccactgtgtgcacagagatgtctggagcatcgctctctacgagagccagaaacaacccaagtgatcagcatagagaaaggcacaccaggccagctttatagtgtaccattacgtggccaaaaaaaaagtgtattaagaattttttggccaggtgtggtagctcatgcctgtaaattctagcattttgggaggctaagatgggaggattgcttgagcccaggagtttgagaccagccttgccaacatggcaaaaccctgtctgtacaaaaaatacaaaaattacaaaaattagccaagtgtggtggtgaacacctgcagtcccagctactcgagaggctggggtgggaggatcgcttgagaccaggaggtcgatgctgcagtgagctgtgattgtaccattgcaccccagcctgggcaacaaagtgagaccctgtttcaaaaaaaaggatttatttagctgggcatcgtgacaagcacctgtagacctagctactaactgaggtgggaggatcacttgagctgaggaattaagagaccgcagtgagctatgattgcaccattgcactctccagcctaggcaacagtgagactctgatctcttaaaaaaaaaaaaaaagagtctttatgataagaaataatgttcatgatatcagtagaaaaatgataacccctaacatgtaaaataaagacagaaaaaatgtgagaaaaaaatactaaaatattaaaaagtggtagaattatgggcaatagttatcttttctttacccttctctgtatttgctatctgtgcatatgttagttttataatataaaaagtgactccttactttttgaaatactatctcagacgtgtggctgtgccagtaattcacctttcccaaaggaaaagagcctctagcacccattttcattacaggaggcacagagagggcggctgcccacgcccctggctgttctgcaggagttacaccggttttctgagcatcgtccgtgagttttccaagctgggccctggggatccagtggtgagtgatggcagacaagctggctgtctctctccctccccactctgctgccaatagagatggcaagatgagtcccagagcctgttggaggcggtgcatttgggggacaggggctgcctccttaaaaacagagtggaaaccagggggacaggccaagtgcatcgaaatgctaggacggttggccaaagctgagcggctcactcttgaaacagaggtggggtctggctcttggtgggtgaaggaagaattggaggaagggaggaagggtaattcctccagcaatttgagtgggaggctgtggggggcaagctattaataacggcagaggccactgtcaggcagactcagggacaagtctcaggcctgccacctaaattcatctgtgggcattggagaggttacttttggtttcagtttgcttatctgtaaagtgtggataatcacagagtccccacctcctcaagccttggggaggagtagcgagaggatgtacgcagcacctgccctgcagttcagcttgagcacgctcctatcttgccagagccggagcgtagctgtagctttagcagagcagcagcaccgagctggctggctctgcctactgctattctcccagcacctggcacatgctggagctcaagaaacaatgcccagctgactgccagggcctttttaatgtgttatctcatgcattccacaccaccacactgtgaggtgagctgtgtcaaccctattttacagatgacaaaattgaggcttaggaagattaaagaatttttcccaagatcatacagctaaagctgcagaaccaagattcaggtccatttgattccaaatgcttctgggaggagcatcttagggacaccaccggtctgaggctcaaggcagccctctctcacccaagaccaagctcttgtagacaacaactgtttaaagggcaaagacagctcctggggaagaggcaggaaaatcaatgaaatgatctgtgatgctgtcagggccctggaggaaggactgagcaatgcaggagttccccaggggctcccgggagggcccaagaggccaggtgggggcggggttgggcagggaagcctgggggagtactctcagaggaggtgacagtccccaacaggaggaaaggctgtcctcctgctgagcttacaagggaagctcccatgccggaaggaagaaccttgaacttctgcttccaatacctgtgtctagcctgtctcatcctggcctgcatttcagagctccccccaactccaggagctctctagtaagccatgcctttgcacacactgttccctgttgctggaatgtccttcccgacagctccctagcccacccttgccctgactcgaatccccttcagactctgctttacttcatggcattgttgcctctaggggctcccctgaccctccatcctcaagccccttggggttccccaaatcccttaggctcccctctcctcaacactgatcccactgttttaattgtggtctcactgctctgtctcttttactagacacaagcttcccaaggccaaggtcatgtctcacatctctgcagcaccagcagcatgcttggcccagactaggtgctcagtggattttgttttgttgagataaaaagtcacgtgccattaaattcccccatttaaagagtataattcagtggtttttagtatattcacaaagttatgaaactatcaccactatctaattccagaacgtttttgtcaccccaaatagaaaccctgtacccattaacagtcactccctatttcttacccccaactcttagaaaccactaaatctacttttttttcactatagatttgcttattttggatgttttatacaaatggaatcatataatatttggccctttgtgtctagcttgtttcacttataatgtttttggggttcattcacgtggcatgtttaagttcttcattctttttatggcttagtaatattccactgtatggatataccacattttatgcatccattcatcaattgatggccatttgggttgtttctattttttggtcactgtgaatattgctgtccaaatataaatgtttgagtacaggtttttgtgtgaacatgtactttcaattatcttggaatagaattgttgggtcatagggaaactttatgttcaacttttttggggtactgccagactattttctgaagtggctgctgcaccattttatatcactaccagcataggaagagggtcccaatcagtccacatccttgacaacaccagtaatgggctttcttttttgtgtcatatagcttctagtggatgtgaagtagccaatggaccattgacgaatgagtgagtgacaaacggatggatggatggatggatggatggatggatggatggacatatgggagtagatacctgaccctgagttctgagctctgattttggtgggacagcctgcttccctgaggacctgcatcaagtagagacatagcaacctgcagcctgcccctgaccatcgtggttccagatgtccaatctgccttcgtcctcggtggctcttaagcacacaggtgacctggattcccctaagcctgtggaaggccctggagggggccccattctgggtgacacaagttttattactcatcagtttcagtttcttcttctgtgaaatggaaggagaaagagaaaagtcacacaagtttctgcagagggtgtggcacatagcaggtccacaataaataggagtttcgtttttccagtctgtttctcatccagtgtgtatataaatgccactccactaattatctactggaaaagagcttgagaagtggggcagtggaaaggaggggggacggggaaagccaggcaagagatttacatatggcaggaagctgcagcaggtcatcgagggagtgggagtcacagagcaaccctgggaggattgtcacaggcttcggaagaggatatcctcccagccatttgcatacccaagcaccactcttactgtcaggaagacctgagcctcctatttaggcctttggatgggtgtggagagagggcagcatctaactagtgctgatctgagatcaactgcaggtccccaggcaaaccccacagaagggtgaatcagattccaaggccagtgaattttatccattgtgccaaccttcatagacaaggaatggctgctcagagccttgcagtgagatcaatgttaaagttctgtagttttaaggctcagtaggaaaaagtagccacccgcatctgccctgggcagatgaccaatgacctgtatttactgcccctgttctagaccagtacaagattagctgtctgttgggtagtttccatgtaaatagtttgttacctggggcagttgaaaggtcaggaggaaaagaagaggggattaaaataaattgctggaacgggggactggcggcggcagtggtgctcacttgaggctccagcctgcagtgagcattgagcacttaatttatggagtgctcagctgaggttgccactagctgcttacgagaggccagcagcgccgtgagccaggcccacttagggaagattcttggctcatccatgtgactcaccttcctcatacgtaacatggggacaatggggatatatgtcacagggctgctgtttatcttgccggatgatctaatgcacatggatgaagaagggaatgtgggaaatacatgctctcagtcttaacagaagggaaaactgaagcccgcagtgggttggaagaggtggagaaaatgcaagaaacacagacagctttgtgattgcaactttgttccaggtcctggttgtgtctttaattccatattaattgttttgtctttagtacttaactcctatctggaagaactcctcattagcccatctgccctggcatggcccacttctgaggggtttccttggcctgtttccctgatgtgtatcatgtgacccctccagttgcctggacaagggtgggcatgtcaccagggagcagccagtggcctcagaggtaccctgatggacctcaggccctgcaggtttgaactggagacagaagagtggtgattgatagcagagttggtatccaaaagccccccagagagatgacggatggagctgcaggcagaagaagcctgcagtggggagtacagggcaggttgctgcaggaggagcagggagtgaggggttgagctccagaccaggacgccacaggcaggcagggtggagagaacccaggccctggagagaactgccttcagggtcccaaagtctccccaggctgcatgattcccgccatgtggcccagcttccttattgcccagagttttaccgtaacctcttgctctctggaagaacctgttcagggaacttgcatttttgcagctccatgacagagtctggcacaggtactattggttaattgaggaagtctgctattttatggcacaaatgagagccagcagtttgcaggcattgaggaaggagaggcgtatggactatgataagggacgaccctggaaagcaccctgatacggcattggctagggttctgaggaagctaataactttgccgaattttgttggaaaggcaatcaacctttttacagccctattaatgactttatcaaatcactgcttttatgatctcttggtgaacccatcaatccacgtagaacatgaagactcttgggttttctctccatgaggcgagagaggttgaaccactcgcataacgttatgtggcagttactgtctaactcagggaatccttcaggaagatcctcagctcccctgctaccttccacatacccaagctgctgtctgtctgaatatgcttttccccatgtaactcagagtgtcgggaggatgggggaggattcccagaacaagtggcacctaaacagggtttggtttgtttttgtttttgttttaagacagcgtctcactctgttgcccaggctggagtacagtagtgtggtcacagctcactgcagcctcgacctcctgggctcaagtgatcctcctgcctcggcctcctgagtagctaggactacaggtgcatgccaaaacctggctaactttttttttttttttggtagagatgggatctagatttgttgcccaggatgatctcaaactcctgggctcaagagatccacctacctcagcatcccaaagtgctgggattacaagtgtgagccacggcacctggcctgagcatctttttacatgcttgtaaaaagcatgtaaaatgtctttatcttcattggtgaagggtctattcaaacctttgctcaatctttaaatttgtttttgtttttgttttgagaaggagcctcgctctgtcacctaggctggattgcagtggcacaatcttggctcactgcaacctctgcctcccagattcaagcgattctcctgcctccgcctcctgagtagctgagactacaggtgcctgccaccatgcctggctactttttgtatttttaatagagacagggttttgccatgttggccaggctggtctcaaactcctgacctcaagtgatccacccgcctcgggctcccaaagtgctaggattctaccatgcctggccccggtctttaaatgtgttatttattttcttactgttgagttttgtggattctttctgtagtctgggtacaaatcttttgttggatatggggtttgcaaatattttctcccagtctttgcagtttcttaaagtgtatcttgcaaagcaaaagtgttaaattttattgaactacaacttgtcaatgttgttttgtgtggatcactgcacaagggtttgaagaacgtattcactgagctgacaaggaaagaaagggagttctaggcaaagcaaacagcacatgcaaaggaatggaggcctgaaaaagtgggctggggttggggaattctaagtacagttgaccctcgaacaatgtggggggttagaggaactgacccctgcacagtctgaaatccgtgtataacatttgattccccaaaaactttactaatagtctactattgaccagaaatcttaccgataacatagttaattaacacatatttttatatgtattatatactgtgttcttacaataaagtaagctagagaagaaaagttattaaggcaatcataagtggccgggcagggtggcttatacctgtaatcccaatactttgggaagttgaggcaagaggatcacttaaggtcagaagtttgagactagcctgggcaacaaagtgagaccccatctttacaaaaaaaatttttttttaattaaccgagcacaatggtggatgccaagtagctagtcccagctacttgggagactgaggtgggaggatcacttgagcccaggagttcaagagtgcagtgagctatgattgcaccactgtactccagcctgggcaacagagcaagaccctgtctcaaaaaatatatatttttttatatattagaagggaaaatatatttacaattcattaagtggaagtggatcacaattaaggtcttcatcctcatcatcttcaggttgagtaggttgaggaagaggagtggttggttttgctgtctcctctcagggatggcagaggcagaagaaaatccacttataagtgggcccatgcagttcaaacccctgttgttcaagagtcaactgtagctcaatattgttgaactacaatattgtacacttaatattggtacactacaaaattggtatactcctcagtaccaattttctgtattagttgatatgcattgttataaaggaatacatgagactgggtaatttgcaaagaaaagaggtttatttggctcacattttgcaggctgtacacaaagcatagtgttggcatctgcttctggtgagggcctcaggaagcttccaatcatggcagaaggcaaatgggagccagcacatcacatggtgacagggagcaagagagagatgggtgtcggagggcagtcctcaactctttttaaaaaccagatcttgcataaactcaagagtgagaactcactcattaacatgaggatagcctcaagccatttatgaggaatccgccccatgacccaaatacctccccaccagggcccacctccaacattggggatcacatttcagcatgagatttggaggggacactatgattctagtgtgtgcatccatgtgtgtatctgtgcatgtgtgtggctgggaggggaagggaaatgactggatcatagaagggaccagatcataggctcttgggggctgtgccaaggagtgtgggcccctcatcctataggtaagagagctaccaaagggtacggcaattgctcacttttatttttgttaacttttttattataagaattatatgtggctgggcacagtggctcatgcctgtaatcccagcactttgggaggctgaggagagtggatcacttgaccccaggatttcgagaccagcttgagaaatatggtgaaaccccgtctctacagggcaaaatgctggttaaaaaattagcaggtgtggtggtgcatgcctatagtgccagctactcaggaggctgaggtgggcggaacacttgagcccgggaagttgaggctgtggtgagccaaaatcacaccactgcactccagcccagatgacaggagtgaaactctttctccaaaaaaaaaaaaaattatatataatttattgtagaaaaatatagatcaatgaaaatatgattaaaactctatatacttctaccacccagagggtagttacactattaccattttggctggttcttctgttcacacacaaacacacacacacacacacgtaatttttctataaaaatgagatcactccatatacactgttttgtaatgtggtattgtttttgcttaataaataatatatgtgactggttttccatgccattattcttttactgtatcattttttgttaagataaagttttttcctttattataatttaatgtaatatttcatgcattcaaattaaagcattacattacaaatgtaatcttatgaattaccatggactcccatctggctacaggatgagaaaaacctactcccatcatctctgtaggctagcatatatttagttcttattatgcgctagatactgttctttatgtgcagtaactcctacagccatcgaaaaaattctctgagatagtgatattattatcaccatgttactatggggaaaggcacagagaggttcatcagcttacccaaggtcacacaggggatgagtggaagaagtagggctagaaatgttggagatggacttgaagatgaatttatatggaagataagggagcagaggtgacagcagtgacttctgggtttctggctgttgagactggggggcagggatgcccctgactgagataggaaaggcaggccgaggaactaatttaggacaaggataaaatcaggaagtctattttggaggcgttaatgttaaaggacctgtgggacatgaaaatggaaatgaacaaatgactatagaatgaacaagtgcatgaatgaattgatgaaagacaaatcctcaatgatatggtttggatctgtgtcctcacccaaatctcatgtcaaattgtcaccttcagtgttggaggtgggcctggtgggaagtgattggatggtgggggtggatttccctgttggtctgttttcgtaatagtgagtgagttctcatgagatccagctgttttaaaagtgtgcagcacctcccccttctccgtcagtcctgctcctgccatgtaagatgcctgctttgccttctgcaatgaataaaagcttcctgaagcctccccagaagcaaatgccagcatcatggttcctgtacagcctgcagaactgtgagccaattaaacctcttttctttataaattacctagtcccaggtatttccttcttttcttttctttttttggcaaggtcttgctctgttgcccaggctggagtgcagtggtgcaatcttggctcactgcaacctccgcctcccgggttcaagcgattctcctgcctcagcctcctgagtagctgcgactacaggtgcctgccatcacaccggctaatttttgtatttttagtaaagtctgggtttcgctatattagtcaggctggttttgaactcctgacctcaggtaatccacttgccttggcgtcccaaagtgttgggattacaggcatgagccaccgcacccggcctagtctcaggtatttctttatagaaatgtgagcatggactaatcaggcaagattattctcagcacagcaacagacagatctggcccatcatgttaggaaaccataagttgaagtgtaatgatgggaaggttcacagctgcttacaacaggccagggcagagaggatgcatagacacacaggatgggggcaagttgttttcagtgatgtttatcaagtacccaggatccagcagctgctccatctgggagtggctgctgctttctctcctgggaagattccttctgatcttgggagtaggatttggggtgaaggctgtgtccagaactgggtcctgccaccccaacaccctgctgagaacaaggcacattccttagcactcagggtaggagagaggcggagggatggagaggcttcaatcccccttctcgggagacaaagggctcttcatgatttaattaaaatgcccatcaaaacctcagaagataggggttagttgagatgaaataaaaatagttggagtgaacacattacaatttcatttcatttcagggatatctatgaggttctaatattagagagagacttaatctatcactaaattcctatctggcctgccacactgggggcatttctgaagatgtccaaattctgttttgagaggcctggagagtcctccgtcctttgtttctctgttcgaggagaaccacagagtgtgacagtgtttggtatgtggcaggcactcaatcaatatgtgcagaaggaaggagggagtttcttctttactcctttaagcttcagatttagaatttgcctaatcttggggtgagacaaagccttgagacctccacagaggtttcctttgcatggacaacttttcctccagataacacatgactcacttccctgcacttccagtctttgctcatgtgtcacctcctcactgaggccagccttgccacccctatttaaaatgacagccctccttcccccaaccctcctgacccccccaccttgctctgtgcatctcccccagagctcaacctcacaccttacatcatttacttactatttgttcattgtttctcctcactagaatgaaggccccacaaaagcagggatttttgtctgttttgcttatggatgtataagtgctatgcatagtgcctgcctcaataaatatctgttggacaaatgcattgattaataaggcagagaagaaatttttgttaattgcaattactattgctttccaaagagagcagactccaaggataatcccgggatagtacagcccacagatccgaaggtgccttattcccaggcgcagcttccccacagactccgggtgttcaggaataaaccccgagtcagggaatgaaatactcctccagcatcaacctgagggccaaggccctacctccacacccactccctggctcggtgcccatcagccaagtccaaacccacacaagttgttcccactctggaaatggtgggggaaaaaaaccaacatccagtgccagaaatcagtgtgatgtacacaaaagctgcttttttgccttttgcagatgcagagtggctgcccaggctcacgtagccagagagcaggccctggggagtggtccaggaaagcactggacagtagtcatctgtctggaaaatattagcccacagtctgatgtcttcaaaacctgagccaggtcaccctttctctttcactgacagaaataaacagttcttggtcttgaaatacacaggactttccccagttactgctgctgctagcactggcttacttagtctttcatggtttagagcctgttttcctccggaagcaaaatttggcttgagcgatatgaagagtaatgaaaacattttaaaatgcaaagctgggttctttttcccaagggtagcttcttggaaatctctggtttttccagcaacagctgaaaaattgaggcctaatggatactctgtgttacaaagtcagagaactccacagatggaaagaatcaacctcctttccctggatgcccttcattttagagctgatgacgccagatgacgctagatgcctagagcatctagacccactccccttcatttcttcctcctgacccatagtctagagactttgaaaacactacaggtgttcagattccatttaaagactagagctcgacattaaatgcagccttcctatcactatgtatgggggagagatagtcttttcactaaatggtactggaacaattggatttttatatgaactataatgaacattgactcctacctcaaatcaaacagaaaaaggaattaagacagatcataaacctagatgtgaaaagtaaagcaataaagcttctagaggaaaacaggagaatatcttcatgacctttgggcaggcaaagatttcttaaacagaacacaaaaagcactaaccataaagaagagattgttaaattggacctcattaaaattaaaaaccatccttcattaaaagatattattaagaaagtggccaggtgtggggctcacacctataatcctagcactttgggaggctgaggcaagagggttgcttgagcccgggaggtcgagaccagcctgggcaacatggtgagacaacatctctacaaaaaaaaaaagtaataataaccaagcatggtggtggatgcctgtagtcccagctacttgggaggcttagatgggaggatcacttgagcccaggaggctgaggttgcagtgagctgagccaagatcatgccactgtattgcagccttggcaacagagcaagactctgtctcctgtcttaaaaaaaaaaaaaaaaaaaagtgaaaaggcaaactgtggactgatatctaacaaagcatttgtgtccaaaatatatatcaaacttctataaatcaacaagaaaaagacaagaaaacgacaaataattcaatgtttagaaatactagaaaattcttacttcacaaaggagaatatccaagtgaccaacaagcatttgaaaaggtgctcaacatcattcatcttgaggaaaatgcagattaaaatctgcaatgagataccacgatgcacctacctaaatggctatagctaaagaatttgactgtatcaagtgttcttgagaatgtgaagcaactttactagtggagtgtgctttggtaccactgctttgagaaactgcttggcagtaactactaagacaatagcacaaaatgtgtgcataatatgttcaccaaacacagtgcagcactaatcattgcatcccagactggaaataacccagatacccataacaggagaatgggtaactgaatacatagtgctttattcataattatttctaattctcatcataactcattcttccatgtcgtatattcatgattatttataacaaaatattgtacagcagagattggtgaactgtgacccacaggccaaactgtagcctactttttgtttgtgtgttgcttattactgcatttgagctatgatggcagggttgaatagttgtgacagagactatagctttcataaccaaaggtatttattatctggttctttgcagaaatagtttgctgaccgctggtaaacagcaatgaaaaagacagactctctattatgtgcaaaaacatggatggatctcacagacataatgtggggtaaaagaagccaaatatggttgggcatggtggctcgtgcctgtcatcccagcattttggggggccaaggcaggagaatcacttgaacacaggaggtgtaggttgcagtgagctgagattgtgccactgcactccagcctgggagacagagtgagactctgcctcaaaaaataagaagccaaatacaaaagagtacagcccgtgtgattccatttacacaaagtccaaaaacaaacaaaattaatccatggtgatagaggtcagaatagtagttacagtagtggcagggaggtatgaggaaggggctcaaggaagcctatgctgtagatcttgatgggggcagtggttcaacaggagtataattatgtcaaaatcaatcaagctgcacaattagattttgtgcactgcatatcacttctaccctaatttttgaaaaggggatcaattgctggcctccaagcagggcctgccacatgcaaagcagagtgatgcagtttcctccttcaccccagagattggacgcagtaatagtagggccatgtcacagtccctttctgaatagagcacccccagatggtggctttcctacccacaggccaccacgtataataccacttgaccccatcaacctggctccaaattcctggatccagctgatggtgccaaagccaaccttccatgtctggtcctcaaactttagtccacttacaaaccacctgggggcttgctagcaacaccgattccaggtccctcttctcccaattcctagtttttttgagtcctgggtgggatccaggaaactgcattgtcagcaagtcctgcaggtgattttgatgcagatggaccagagactacactggagaaacgctctgtgcaggctgagggagtgggcatgaggaggcaaaggggagaaggcaagagggtgaaattgctcttgaccagaaagggaagcaggagagagctaagaggaagatgtagcggaagaggaggtgagtgaggctgagggagagcaggcgatgaggtggccttgatgaagtctggccatgtggtgtgtcatggaaaacctgtttcctacctctccaccaaagagttggtaaaatatctgtttatcaagggaaccacccccaatatttcaacgtaagttctcttctatttccctaagtgtcagccagtctgagaaataaagggaaagagtacaaaagagagaaattttaaagctgggtgtccaggggagacatcacatgtcggcaggttctgtgatggcccccaggccgcaaaaccattaagtttttattagtgattttcaaaggggagggagtgtatgaatagggtgtgggtcacagagatcacatgcttcacaaggcaataaaatatcataaggcaaatgggggcagagcgagatcacaggaccagggcaaaatttaaattgctaatgaagttttgggcacgcattgtcattgataacaccttatcaggagacagcgcttgagagcagacaaccagtctgactaaaatttactaggcaggaatttcctcgtcctaataggcctgggagcgctacgggagaccggggcttatttcatcgcttatccacaaccgtataagacagacattcctagagcagccattttagagacctccccctaggaatgtgtctctttctcagggctgttccttgctgagaaaaagaattcagcgatatttctcctattcgcttttgtaagaagagaaatatggctctgttctgcctggctctcaggcagtcagacctaatggttatctcccttgttccctgagcatcgctgttatcctgttcttttttcaaggtgcccagatttcatattgtttaaacacacatgctttatgaacaatttgtgaagttaacgcaatcatcacagggtcccgaggcaacatacatcctcagcttacgaagatgatgggattaaaagattaaagtaaagacaggcataggaaatcacaagagtattgattggggaagtgataaatgtccatgaaatctttgcaatttttgttcagagattgcagtaaagacaggtgtaaaaaattataaaagtattaattcgaggaactaataaatgtccatgaaatcttcacaatttatgttcttttgccatggcttcagccagtccctctgttcagggtccctgacttcccacaacatctgtttcttattaatatgctatgaggttggcatttgcagggtgtgttgaagggctgagtccacctttacagggtgaaaaaagaggctgtccagagaggttctgttctgtcacatgtggatttgattactgtagaggaaaatgagtatcaccctcctcccagcacttgggctcagtcattcccatcaaaccttctgttgttttttttgtttttgttttctggtttttggtttttttttagatggagtctcactttgttgcccaggcaggagtacgatgactcgatcttggctcactgcaacctccacctcctgggttcaagccattctcctgcctcagcctcccaagtagctgggattacaggcgtgccaccacgcctggctaatttttgtatttttagtagagacgggaattcaccatattggccaggcttgtcttgaactcctgacctcatgatccacccaccttggcctcccaaagtgctaggattacaggtgtgagccactgcacctggcaaccctctggttttcttcatttggttcaggttgaaagttgcctcagcccatattcagatacatatatgtgtaggtgtgtatgtagattcctgagcaggcccctatgggcaagaccaaccaagccagatgatgtgttgtgaatgaaagagtgggcatgagataaattacattaaagaaattgacgacgtcttttgtagcttacagacaaacagcaggtctttagggactgatacgctataacctccaaggtagatatttaagtttaaaaagcaaggtgttttagtataatatgatttctgaacaattagtgggggagggatgcatctgtaggtttttatacattaaacgtcttaggaagaaacattgaaaactagcagagtgatgggctccaagaagagaaattgggcatggaagataatcaagcttgggaataagacaattctttttaaggaacagggtctcattctagctcctggctgggggcctcctggctggagggcagcagtgccattatagttcactgcaacctcaagcttgcaggctcaactgatcctcccacctcagcctccctagtagctaggactacaagcatgcaccagcacacccagctaatttttaaaaagtttttgtagagatggggtctcaccacattgccctagttggtcttgaactcctgggctcaagcaatcctcccgcctcggccttccaaagcactgagatcacaggggcatgagccgctgtgcccggcccaacttttattctatattctttgatgctgtttttttccctacataaattttatctatttaaaacattttaaattgagggaggaaagaaggaaaaaaggacaagaggaagggaaggaaggaggaaacagtattcctagatgggtattggctcctgaagagccagtgcagagttgagagctgttccagcacatgaagcaagcacgggccctggaggatactcctctggccaccactgatgcccatgggcaggaagccaagttggttcaccaagccagggctccctcctccatcacttcatccatggactgtgggaagactgtgttgtcttaaagtcatgcccacaccctgggtggaaatgccgtggtgtactaatgtggaatttccagcagcttctctagcacagtacagttcagagattgttttctttgtgttaacatggccaaggttgaagcaagaaggctgaagtgtggaaagtgcagaaatttggaaaatacatgaagggctgtcaaacggcctcctcctggtcactgtcagagcaccaagacctgacaggcaggatggcagtggcaaaggctctaggcccagactatctggaatcaaatcctggcttttctacttgcagactgtaagaccctcccgagcatcatttcccctgagaacctaacagaatctaccacatagggctgtggtgagaatgaagtgcattaatgtatacaatgtttaagcagggcctggcagaacaaacacacagcagatgttagctgctcaggctattgcatcttatctgaattctaacagctccttgtaaagcaggttactttgatactccgaagcttaggtaaatagacttcataagggctacccaacggagtctctgctaccaagcccagggtttggcccacgacatcagcatttctcaaaccctatttgagaacccttagtatcccaccaaaattttaataaatactactccaaaacagggttttgtgaccaataagtttgggtaacactggtttaagtgaaattaagcaggttatttgctgcagaatttatcagaacctttacagtgccaatgaatgtgtggctcttagatggagtagcatttcccaagtcattcgaccattaaataattttctttttgtagtacactattaacacctagaggaacattagggttgtatatagaaaataactttggaggtgctatgttactgtataggacaggcatggttagaggaaatcatctgttttcaggccagtctccatcaaagagaacgtcttcaaagtagactgtagaacatacctgggcatggtggttaagagggagataatgagttgtggaaagaacatgagtactaacagcgggatctgaattcaaattctgactcctccaactaggggaaggcatttgctttcgcagaacctcaatttcctcatctattggttggcagactagcatctacttcattttgttgatttaagatttaaatgtcagtggccccaaagtgattgccacatgatagtttctcagggtcagtttcctttttgtatcagtcaggatgttttcagtggcaaatagcagattgccaaacttaaattggctcaaacaaaaaaaaaaagcggggggaatttatcaacgtaagcaaacgtccaggttggggtttatcagagtttgtggtgtccttagagcaggtgggaattctccccaccagagagcttaatgcccaggcctggaaaattctagactgacaattgtatatagatgatctgcaagtgccttgatccctaggggtcaacacatatccaccaaaaacaagtcatttgcacttttgcagatcatctttagtttcccctttttcaaaaggattattttttcagggggccgtgatgaagcaatcagtctcaagccacgtgggcaggcagccccaacagctatgagaattttcagaaggagtttacaaaagcatagcccaagagcctacagttttactaatagaaactgctgaaagtaaagcctacaaaatctctttggcttgtagaaatattttaaaaactgaaataattaattattgcatagggcatgggcaataagaaataaaaagtttaagaagcacaaccatggatgtactgtagcagaataatagcagctgccactggtggaaacactgctatagttccatgtaaaacacatagaattttgacttttctattaaagcacaattttaagtgtttttattaaggtgcattagttgtatgtatgctgctcagtggattttttttttttcagtttttatttctttttctcagtcagggtctcactctctcacccaggctggagtgccgtggcacaatctcggctcactacagccttgacctcccaagctcaggtgatcctcccacctcaggctcccgagcagctgggaatacaggcatgcaccatcacacctgactaatttttgtattttttgtagaggtgaggttttgctgtgttacccaggctggacttgaactcctggcctcagctcagtcttccaaagtgctgcgataacaggcgtaagcctccgcaccaggccagctcagtgaatttttatgcacatacacatacacatctatacctaccattcagatcaagatataacacatctccagctccccttcatgaatgcaccagttgatgaaagttcattcatgctccttccttgtccatcccctgcttcaggaaccagtattctgattcattttgcctgttcttgaacttcataaaagtggaatcacatagaatgtactcttgtgtctggctttcttagcttattgttacagccaagagaggtaccatactgctgaatgtattattaatttcttctttttcattgctatgtaaatttatttgatagacattagggttttgcagacattttgttgctaccttttatcataatgtctacaaaatacttatgctaacatccaatttagtggtaaactattgaataattttcttctgagtttgaaaacaagacaaaaatatctactactgtctgagtgcgggtgactcatgcctgtaatcccagcacttcaagaggctgagacaggtggattgcttgagcccaggagttcaagatcagcctagacaacatagcaaaaccctgtctctgcaaaataaataactaaataaaatagaaattagccaggtgtgttggagtgcacctgtagtgccagctactcaggaggctgaggtgggagaatcactcttgcctggaggtcaaggctgcagtgagacacagtggtggctctgcactccagcctgttgacagagcaagactctgtctcaaaaaaaaaaaaaaaaaaaaattctactatcagcagttctattcaatactttactaagagacctgagttctggcccttacccctgcctctaactacctagggaccttgaataagtcaattaaccactctgcttcttagtttcatcatctttgaaaataactagataatgcttaagatcccttctgcatatctaagttccaagtaaatgcacctttttttaaaaatgtgataccacaacatggatgaatcttgaaaacattattctaagtgaaataagccagacacaaaaggactttttccacttacataaggtatctagcatagtcaaatacacagagacaagctagatcaactaggaggaaaaaagagagaagactcaaataactaaaatgagaaatgaaacattagtactaattttacagaaatcaaaagattatgacagtgctttgaacaatcctaaaccaacaaactggataacctagatgaaacggacaaatcctagaaatacatgctaccaagattgaatcatgaagaaaccagaaaatctaaatagacctatagttttaataaggagatggaataagtaatcaaaataactcccaacaaataaaagctcagggccttatgtcttcattgatgaattctaccaaacaattgaaggagaattaacaccaatccttctccaactcttccaaaaaattgaagagaaggaaacacttcctaacttattgcatggagccctaataccacagacacaggcattacaagaaaactgcagaccaatacccctgatgaatattgacacaaaagttcttaacaaaatattagcaaactggatttaacatcatatttaaaagattatattgaaagaatgatccagagtaattaggcaagaaaaagaaattaaaggtatctaaattcggaagtaaaaagtaaaattgtctgttcacaaatggcataattgtatatgtagaaaaccccaaagagtccacaaaaaaaactgttagaattaacaaaggatttggcaaaattccaggacacaaaataacacagaaaaatcagctgcatttctatacactaaaaatgaacaattggaaaagaaaattaagaaaacaattccatttacaatagcaccaaaaagaataaaatacttaggaattaactgagggagtgaaagacttatacactgaaaactaccaaaatatagctaaaaaattaaagaagacacgattaaatgaaaagacattcagtgtcttttcactggattggaagactaatgcagttaagatcaatgcaattcctatcaaaatcccaaatgatattttttgtagaaatagaaaaatttattataaaattcatatgaaatcccaaaggaccctgaatagtcaaaacaactcgaaagagcagaacaaagttgcaggtttcacagacattttttccaccactgtgtgaccttgggcaagttactgaatctctctgttcccaagtttcctcatctgtagatgaggataacaacatcacccacatcatagggcttttatgaatatcaaatgaataaggatatggaaaatgcctacaacacagactgaaacatagtaagtactatatacagaatagcagctattattaattttttattaacattactccctggatggctgggggagcctagagaatttctgcagagatatctggctcccttgtaggtgatttagccaagtggtacccatttctgagaagcatattttttctagagtcaagtcaagacttagagccaagtgccaagaaagaaaattagccagagggctgaatcacttgactcacctggacagggaaagccccacatctgctatgctcagacctgcacagggtgccgcagaatgcaccagtttaataaactggggaaattggggagcttgtttcctgtcctttgacttgactttggcagcaaggggacagccccagcccttgcttcccaaagccaactcatgcccttccattgaccacaaaagagcacactgtcctagagacaagactgttactcaccaccgctgccattcacctggcaccctaagaaggaatctgtgccttccaaaagacacacagctaaaaagaatcaatcactgagctgtccccacaagtggaaactttctcattaagaaggctggaagcaggagatggagtgtctgcatttaattctgtaccctttccttgtgggaagcattggttgtcaatccagagaagctggaatcttccctgggaatcgccgacaagagtgataggggtcactgtgattctaaacactccctacaggcatttgcaatgcagttctcacagctggttgcaaaagtaccagaagagagaaggcaagaaaacaaggtaattgaattccccggcaaatgtgatttaagaaaagttgcctttgtatacaaggttaaacactggaactgggccagcttgtcagctggttcaggagggcaagcccagggccaggacatttgcctttgagcacaggccacttgtacaggtctggctgtttgccaccatcccagcaggaccacattccaggtggaaatgccaaaatgtgcacactgagaatttccaacagctgaagctcctcttcaggccgtgaagtcagtgctagtccttgtggcaactctagccaagatcaccctggtttttttactttctctcttgagagcagcacatagaggtaaatacagtattgagcaactagtggaaatagaaggcatgggggttttctggtggctgactcaagctggcttgtttgtgttacctgtatcagccgtgactctcaaatccatctttctgaaactcaagtcattgtgagcaaccacctctcatccctgaaccaaagtcaaaaataaatgtgacatgggatcaggcgtggacgcgggagcttaattataaattgactgctctcccgagaagaaacgtcactgattcgagctttcatgatttcatggtgagacctaaaccatttttgcttctgcaaaaccgcagtcaaagacatctctgaacaagttaccccaagtctcttacatgaggatctacgaaatctaattttccagaaatgtaatgccaagtgaatgtttgcttctccaaacaaaaatgctgcttgtcaacaagcaaacaaacaaaatgctgatgctgctacttcttggttttgttcttactcttccttgaaaatcaggtgattaaatttacatggtccaccatttctctttttgccttgagtgctaggaagctcagagtcaaatttcatgctcaaactatttgtccacattcctgatagaatatttcccactttgccattatgaggcttccagtctctttttaaatgcttcatggtcaccgtattttaagttgtaaaacccctcatgtcctttttaaataaagaggcagaataaaattaattacttaactggtttaatcacttaaacctgacttggggttaagctccaaccatgctacttaaaatagaattgagcacctaatgctcctgagaccttggtaacagctattgttcagaaagaattggctctgggtagggtttgggttactgatttgaatctgttttcttggaactaatttgaattgattggtgaggctgagggacggtcacttcctacactcctttatttgaaaggattatgtttttgtattatagccagggaggcaggcaggtgcagtgactcaaaataatcttccttgctctcagcaaagcacttcacacggctacatacatccatgttcttatctttcagccgaattgttacaacaaataccagccctgcaaaaatctcaacagaacaaaagatccccaagtcctgggaattaaaagagatccacttattagaacaactgttctcctgctttgttaactaacaaagcagcagaacaattacaatacttggattgcactcaggattggttaaaacaggtttacacctggtttatgaaataagtaaacatgggtcgtgttcacaatgttatgttagggcccactatttgcaaaatcaatcaattgccatctattcagttagaaccctggattagttggaattgtgcaagttgctggtaccaaaatggagtctcttatgtcaaaactctaataaaatggagttgggggcatgaaagaaggagctctcatatgcatatctgtaccctgtcttatcacaagaaattcctacacaccccacatgccccacttgtcccacatagcatacatgccctgcatgtaccctataacagcttatcagaagaactttctcaatattgcagtattttaggtgagctggctacaccaggacacttagctgacaatggctgtcaccaccaatgaacaaatgccaactctgtcatgagcttctgtgatctatggactttgtttcaaagcaatttatgtggacttctttttgtctttcaaagactctcctttgccccaatactcctggatatgtttatgatcaatcatagcccacatatcctgagcttgcaacccctcactattcgcaaataaacacatttgttctggagagcctatccctttgagtttaattttaggtttatatacaatgatgtcaaaagtggaatccaaagcaagcttcacctcagacagattggtggcccccaggactatgtgctgtacccaccaagccacttgcacgccccacttccatgagttgtcgctttgccctggtcagtctcctcttgaattttggttgctcctgaatttcggttaactttattcaatatctggttctataaaagcctaaaggtcatcatccttctggtttgacctgcatgtctggcttacagttttggtgagttagatttttcttatttctgaacatcttccaagggcaaaataacataatcaggggcacaggtcaacactgttttggctttctatctaccagggcatacagcttattaggcctgcctctgcaggtgcccgatcaaaaggttggcagcccccaagaaaatggctggacagaaatgtggattgcaccacatttgtggtgagtatatttataaagtttttccttttgctcttgggaaattaataagaaggagaatggaatccccaaattctaaagcttgaagagatagtccttctttagggactccagctgactacatgttcaaacattgtggccctttctcatgcacatttttaagccaataggcaaattacagcaaagatagttttaaaatataatggctatcatctagaatgttccatatgaacaacaacacactttaagaagtacatttaaaaattagggctcccaaattaggctatctagaggtgtctattgatgtgcagaagcttctaagaagatttcaaaattttttattgtctctttaaaaagacttcttacagacagcaaataaaaaatttaagtgactaattggaaaaaaaaaaaaaaggatacaaaggagtataatggctaacattagagactcccttagcagatccctcataggagcatgcaggccccaccccacaatgtggaaataaagggaaagagttccttcaagggaaattccagctttgtctaaaaatcttcccttagcaagatttttaaaagctgaaatcagagcaaagttaaagttatttaaacccaccataaattccttttctctgtaaattcctttgattcaggagaaaaacatttacaagaacttgtttaaattatttgtgcatttgaagcattgtaagaacttcttgtttgtttggccttctctcttaagctaaaaaggaactatgtacaatcatgggtcacttaatggcagggatattgtattcgtccattctcacactgataatgaagttataccccagactgggtaatttataaagaaaaagaggcttaatgaactcacagttccacatggctggggaggcctcacagtcatagcagaaagtgaaggaggagcaaaggcacatcttacatggcagcaggcaagagagcatgtgcaggggaactgccctttataaaaccatcagatcttgtgagactattcactataaggggaacagcatggaaaaaacctaccccatgattcagttacctcccactggttttctcccgcaacatgtggggcttacgggagctacaattcaagatgggacttgggtggggacacagccaaaccatatcagatatgttctgagaaatgcatcatgaggtgatttcattattgtgcaaatatcattgagtgtacttacataaacctagatggtatagcctacagcataccttggctatatggtacagcctattgctcctaggctacaaacctgtacagcatgtgactgtactgaatactgtaagtaactgtaacacaatggtaagcatttgcatatctaaacatagaaaaggcacagtaaaaaaatacagtacaaaagtttttttcaaaggtatacctgtagagggcacgtaccatgaatggagcttgcaggactggaagttgctctgagtgaatcggtaggtgagtggtgagtgaagatgaaggcctaggacattattgtacactactgtagatttactgtacatttagatgacactaaattcatttagaattcctttcttcaataataaattaaccttggcttactataacttttttactttataaactttttaatttttaaaaaactttttgactcataataacacagcttaaaacacaaatacattgcacagctatacaaaaatattttgtctctattcttataagcttttcttgttaattcttgtttttttttttactttttaaactgttttattagaaactaaggcacaccacacattagcttaggcctacacagtgtcaggatcatcaatatcacaactgccttccatctccacatcttgtcccactggaaggtctttgggggaacaatgtgcatggagctgtcatctcctgtgataacataccttcctctggaatacctcctgaaggacctgcctgaggctattttatagttcacttaaaaaaataagtacaaggagtatactctgaaataacagtaaaaagtatattgtcatattcacatagtcaataaaaatgatagttatttgtttacatatgtataggaaatacacaaaccagtaacatagtcattgtattatcattatcaagtattatataccttacataactgtctgtgagatatttttgtacaactgcagcacggtaggtttgtctacaccagcatcaccacaaacatgagtaatgcattgcacttggatgccaagatggctatgaccacacccagacctgcaacgctgcaggtattaagaccagaggtgtctccctactgatcccagcaagtccatttgtgtgaaaacagacagggagctgccagaagttcaaatgtaggatttcaagtgcccagccaagtcattggctcccagaatacataatgaaaaccaacaacaaacaaatcgaaacagctcagaagcaaagcaaagtgctattggaaaagcagcaccagtgcttttgtgagattcagagatataatccctgccacctccaaaaagaagcaataagaacaattatgtaagattctttagggcaaggactgagatagagcagggacccctcataggagcctgtaggcccctccctgcaacatggaaataaaggaaaagagtttcttcaagggaaactccaggcacctagctagccctgagaagaaaatgagtgacctgatcattaagaaggtaatagtagcttaaaactataaccaaggaagttagagtcacaagatgttccctgtagaacattatatttatccctttatccctaacgataacgtcttaacatacgtttctctgagttgtttttcaggtacctggacccctaccaaatggatccactagcacacaggcctcagataagggggaactgcggattgaactctgaccactcctctttcttctgaagttcttcctgagggacctggaggaaatcatacccacaaaccagagcttacattcttttctactgaccccaaatttttagacaaagctttgcttccttaaccaattgcaaatcagaaaatctttgaatctttgaatgctttgagacatcccccctttttaggtcaaagcaatatatagcctccatgtattaatatgtagttgtgcctgtaacctctgcctccctgccttaaaaaacccttaacaagccatcggggaagccaggtcttaagcatgagctgctggattctccttgctgggcactcgcaaataaacatcctcctttctcccactgcaaaccttggtgtagatgtttggacttactgtgccaggtgagtggtcagtggatcccaagtggattcagtaacaattagttggcaactacaaaggggcgaaagtcccaaccggtggccttgcccatggcacaccagcccctggctgcagccacccttggaccctgtccggcagttggctgaattattttgctcagggatggatccatgcattttatgcttgaccaggtgtcatgggccatggcatttttacttttgtagcattaaaaataaggcactgggcttggaagatgtccttcgtaagtggtaggtttgtgggcaacagccccaaggtatttttttctttggacactgggttctgctttggcaggacaactgactttgctttggcaaggccctgggccctgctttcttagagtatttggtttgattggggatactcactagagagctgaagggatccagaacttgagaaaccatatttggttttgacttgctgaaaacagacttgcttgaaactctatctgaagcctggctgaggcagcaaggttttcatcacctatggttttgtcatctaaaatgggaaacacaagctctattctaccttgcagcccattagggtgtattctgcagaactgggccatttttagctttcagcccatgaaaaagaaaaagttttttttttttttaattgtagtactgcttggctgcaatattctttagactctggaggaaaatggcctgaaaaggggtcctttaaattggactcctaaattcaaaaaataattttagagatctctttttctaaacagttgatgggaaaatcaaattttaaaaaggaaatgcaatagcgtcatggctagccttaagaattctcttgactaaattaaagaacaaaaatataacctaaaacaaagttaaaaaatattgcaagctaaaaactacatgacttagatcttctccaggaataacagcaaagaccattccatactgtagtctagcagctaaagttccaccatttcactacagcagcttgggttcagtcagggaactgaaaccacctttgcaaaaattatatcaatgagaaaattatgacagtgaaagagatctgatctaacccaccctcctctttcatttcctttaatcattcctgggtttaggcctagctaactttggaagacacttaggttataggccttccccagagttcaaccacctttgtaaagctaataagagaccctcagtctagggggaggagagaagcccaaattctgctaaggcatagacataaatgactgtcagccattattccaggggtcctgcaaatagcatcactattgtagaacctaagattggcctttttatatatcttttcaggctttttgcatgtcttctatccatggctccacctagacctgccaactccattcctgtggccccacccagaagcaactcagctcaagagcctttgaaaatcccctaacctactagcctgagatgagattgatttgagtgctaactcaatctcctgcatggcatggccagcctcatgtcaattaaactctttctttgctgcaatgctgtggtctttatttgtgcagtgggcaggaagaacccaatggaaaattacagaacaagtcttattgatttgatattcatgtgacttttgcaacttactgattcttttcctttccaggaaccgcttttgatttcctgccctcttccatcttagaggcatatggactttgggggtcttcgtgtttagattctcagctgagattctagagaatatggccaaacagaaatgtggcttgtactccatttgtagctagcaaaatttttctttctttgagctgtcttgagggtgattctggatcttgtgagcactgattttcacctcttcggagacctcatgcaactcttggttgagtcatgttaaaagaaaaactttagccgaattaaatttaaaggagtttaattgagcaatgaatgattcgcaaattgggcagtccccagaatcacaccagattcaaagagactccagggatgcctcatggtcagaacaaattcatagaccaaaaaggagggaagtgacatacagaaatttgcaaaggagagtctttgaaagacaaaaggaagtccacataaattgctttgaaacaaagtccatagatcacagaagctcatgacaagagttggcatttgttcattggtggtgacagccattgccagctaagtgtcctggtgtagccagctcacctaaaatactgcaatattgagaaagttcttctgataagctgttatagggtacatgcagggcatgtatgctatgtgggacaagtggggcatgtggggtgtgtaggaatttcttgtgataagacagggtacagatatgcatatgagagctccttctttcatgcccccaactccattttattagagttttgacataagagactccattttggtaccagcaacttgcacaattccaactaatccagggttctaactgaatagatggcaattgattgattttgcaaatagtgggccctaacataacattgtgaacacgacccatgtttacttatttcataaaccaggtgtaaacctgttttaaccaatcctgagtgcaatccaagtattgtaattgttctgctgctttgttagttaacaaagcaggagaacagttgttctaataagtggatctcttttaattcccaggacttggggatcttttgttctgttgagatttttgcagggctggtatttgttgtaacaattcggctgaaagataagaacatggatgtatgtagccgtgtgaagtgctttgctgagagcaaggaagattattttgagtcactgcacctgcctgcctccctggctataatacaaaaacataatcctttcaaataaaggagtgtaggaagtgaccgtccctcagcctcaccaatcaattcaaatcagttccaagaaaacagattcaaatcagtaacccaaaccctacccagagccaattctttctgaacaatagctgttaccaaggtctcaggagcattaggcgctcaattctattttaagtagcatggttggagcttaaccccaagtcaggtttaagtgattaaaccagttaagtaattaattttattctgcctctttatttaaaaaggacatgaggggttttacaacttaaaatacggtgaccatgaagcatttaaaaagagactggaagcctcataatggcaaagtgggaaatattctatcaggaatgtggacaaatagtttgagcatgaaatttgactctgagcttcctagcactcaaggcaaaaagagaaatggtggaccatgtaaatttaatcacctgattttcaaggaagagtaagaacaaaaccaagaagtagcagcatcagcattttgtttgtttgcttgttgacaagcagcatttttgtttggagaagcaaacattcacttggcattacatttctggaaaattagatttcgtagatcctcatgtaagagacttggggtaacttgttcagagatgtctttgactgcggttttgcagaagcaaaaatggtttaggtctcaccatgaaatcatgaaagctcgaatcagtgacgtttcttctcgggagagcagtcaatttataattaagctcccgcgtccacgcctgatcccatgtcacttttatttttgactttggttcagggatgagaggtggttgctcacaatgacttgagtttcagaaagatggatttgagagtcacggctgatacaggtaacacaaacaagccagcttgagtcagccaccagaaaacccccatgccttctatttccactagttgctcaatactgtatttacctctatgtgctgctctcaagagagaaagtaaaaaaaccagggtgatcttggctagagttgccacaaggactagcactgacttcatggcctgaagaggagcttcagctgttggaaattctcagtgtgcacattttggcaatttccacctggaatgtggtcctgctgggatggtggcaaacagccagacctgtacaagtggcctgtgctcaaaggcaaatgtcctggccctgggcttgccctcctgaaccagctgacaagctggcccagttccagtgtttaaccttgtatacaaaggcaacttttcttaattcacatttgccggggaattcaattaccttgttttcttgccttctctcttctggtacttttgcaaccagctgtgagaactgcattgcaaatgcctgtagggagtgtttagaatcacagtgacccctatcactcttgtcggcgattcccagggaagattccagcttctctggattgacaaccaatgcttcccacaaggaaagggtacagaattaaatgcagacactccatctcctgcttccagccttcttaatgagaaagtttccacttgtggggacagctcagtgattgattctttttagctgtgtgtcttttggaaggcacagattccttcttagggtgccaggtgaatggcagcggtggtgagtaacagtcttgtctctaggacagtgtgctcttttgtggtcaatggaagggcatgagttggctttgggaagcaagggctggggctgtccccttgctgccaaagtcaagtcaaaggacaggaaacaagctccccaatttccccagtttattaaactggtgcattctgcggcaccctgtgcaggtctgagcatagcagatgtggggctttccctgtccaggtgagtcaagtgattcagccctctggctaattttctttcttggcacttggctctaagtcttgacttgactctagaaaaaatatgcttctcagaaatgggtaccacttggctaaaccacctacaagggagccagatatctctgcagaaattctctaggctcccccagccatccaggtagtaacattaataaaaaaacctgtaacctattttaataggcagacaagattgaaaacctaacttaggaatatgcacctgtaacagtagctgagtcttggccaatcccaacagccatactgcaaccactcaagtgttcaaactgtgttcaaataaggtaaacaccaacctgtaaccaatccaactgtttttttacctcattcccaatttccacaaggactcaaatagagaagtacggagtcctctcagaccatatttagtttgctttaacagtcataaccctggttaaggcctattagtttcacagggaaggctatctttggaaaaaatttcaaaaaccagaaatatcagtggttcaccccactaaaatctggtaataagagatgtgaaatttttttaaaagagctttataatcagaagtcaacataattaaaacagaatacagaatttaggctatttatgtgtgtgtgtgtgtgtgtgtgtgtgtgtgtgtgtgtgtgtgtgtgtattttaagacctctgttctctctctataaaaatttctccatcaactaaattcattttgtcttgaactcctgctagccttatgcactccgtctgtctgtctctccattcacttctgttggcccctccttcctcttgccatccttgatgccacatgagaggaccagaaaaatacgttctaacagcctgagatcccttaaggaaaacagaaaagatgccatgaactactcttttgagaggaacctctgtttttcctcagggaatcccaagagttgtaaatatacagaggcctcgcctcccagacctaaaattctgttctcttttgtattctattaccttatctgttggtttttgaggtgccagaaattactctatattatgaaaaaaattcccttataagatcctgtggtaaattcctgcaattttatgttgcttgatatccatttttagttttcctgcagcacagcctaaactccttcttaaagttgaataaattcttgctctctctatcttttgagacatggatggctacaccttgcttccactggggctccatgatgacttgaaccatgtgggacaaatggattttcattcgttccacttacagcaacataaattgaatccagctatccttttaactttagccagtctcatggccagagttttaaaatcaagactgtagtgtctttgtttatgcctgtttggatctttattatgtgcatgtgtatgaccttgtatgttgcctatgataccaaattggcttgtaaataaaggagtacttataaattaaatgaataagtccaaatgcttttcaggttcccatgattttaataatctttagtaaataaagatagtttcgaaattgttggtaaaacaaaataaaagtgttttcagaatttaatgtagacatttctgcccagatctattgatcagatactgtctctgctaggtgttttaaggtcataaaactattgcttctgtagtcctttcgatacttgcttcacttgtctataagcttatgtatgtctttagatttgagccttcgggccatgatgaggcctagatccaggaaaagtcctttgtcctggggtctacatctgaaacattaaaattgcttatttcctgtgcttttcattgaaaataagggttattaagaattaacattgtaattaatatacgcagtgaagactactagagatgagaaaagcaattctatatgcaaaggattttttttaaaaaaggatgtgaggggtgttttgttttgttttttgagacaaggtctcactctgtcagcaagcctggagtgcagtggtgcaatcatggctcactgtagcctcaacctcttgggttcaagtgatcctcccacttcagcctcccaagtagctgggaccacaggtgtgcaccaccatgcccagctactttttaaattttttcatagagatgggggtctcactatatttcccaggctggtcttgaactcctgagctcaagggatcctcctgcctcagcctcccaaagtgctgggattacaggcgtgagccactgcacctggctatatgattgttttttatttggttataaaaggtgtaggaatgtggtttttgttaaagggaaagtaaaatggaaagaaagtttaagagacaaagtaatttttcttttacatgagatacaactttgtgtggtcaaaatgatgatagagaaaagaaagtaaatttttgtcctaaggtaaaatgataggacaaaactgaaggtttaagcaagttgtagaaaaagatttatgaaagattaatcatgtgaaaggagctttgtgtatgatcaaattgactaaaattaaaaggggatgatttaattttttcaaaaattaaacattaatatgaaaagcacactaatgcagggtcagagtctgggcctccatgtcagaatggcaaagttttcttggagcattgaacttctctttaataaacaattataaaaggttataaaagggtaataaaaatcttaccttgtgtggttaaaattaactgaaattggatggatttgtttataaggttttattaaaattatctttagcattaataatatgctaatgaaaaggtaaaacttggctttctcttttaataagattttcatataatattaataagacataataacagattatgtttacccttagaataagctccaaaaataaaacaagcaaaagagaaagagacacattcagctggcattatgctgtctttattaggtcttatgattattcggaaaactgagtctcctccctatgaaatagtaaattttgcttttcaaaatcctggaattatcactttggctaaatgaatgactattgctttatagttacctgtgatcctattttgtgatatcaagtgttttaaacctctaatatctgacaaacattccaaaattaaatttcaaattcttgattcagtctttttgacctcaaactaatttttttatattaggacccctggaagtccaggaaagacatattgggtttacttggtatcttaaaatcatacaggaaacattgtgaaatataaaatggtatttaactttgtttgggttgtatttgcataaatgtgttattaatatgtgttccaaaattatatgagattcttaaaattctgatgccttaatatgttatcagcaatgattataattattatgttaaattcttgtatgtcacagactcttgtcaattgcatctttaatcatagcttttccatgacttgctatctataacttctcaaaaagtgatttctcctttgaagaagttcatggaaaggattctaacaaatactcttgaatacaggtttctgataactttggaaatggtaccattgactaggaaaaaacaaaaacaaaaacaaaggaaaaacctccagaactctaattaaaaagctgatgtattcatgaggattgctagctcaacatcaaacagaacaagagttaattatatggagctaaactaatagataactggaagcatttttttactttattgtttgaaacactgctgttttttttgttttattttcttgagtcaagaaaactttttcttttgagctatttgtagctttgaacaattgattaaagtaaactcttgtaagcaaaacttcaagcatgtttctctctacctaatttttccaaaatttggaaaccgttagtgagtattcttagtttatagcaatatagttatttgcataagtttaataggaatctgggcggggcacggtggctcacgcctgtaatcccagcattttgggaggccgaggcaggcggaccatgaggtcaggagatcaagaccatcctggctaacacagtgaaaccccgtctctactaaaaaatacaaaaaaaattagccgggcgtggtggctggcgcgtgtagtcccagctactctggaggctgaggcaggagaatggcgtgaacccgggaggcggagcttgcagtgagcggagatcacaccactgcattctagcccgggcgacagagcgagaactccgtctgaaaaaaaataaaaataaaaataagaagttttcttttgtaacaggacacaattggagacactgactattttaccaaggctttgattggaaatgcatattttcacatatgaccagactgctttgaggaactgaagttaattttgtagagccaacaaaaagtccttgggaaaaactgtctgcacaattccctcacaaagtttctgaccctgtggtaagtaaagtatgtaactttctgacagcccaagaacctcaggatattttgggacctcaagaagaggggaattaatgcaattcatacaggtatctgcaggcacagataaatccttgacttggctttagaggcttttaaaaagtctaatctgatattccttatgaaaaaatattccagcaaagccaactttaaaagagcttatatagtcaataactattttcactgcacattatgcaaataatcaggccaaaaataagaagactaaaacttattttacaaataagttggtcctgctgtggtttgtctttgatagaaatgggggatagagagagaaaaatttcttccattttcctgacttggactcaatgaaattgctactacctttttctcgagctgaaattcatgccttgtgatgttttgagcctaatatctagatgacccaactgactgccctccggactgtaagacagctggtttaaggtcagtttcatcctcgatggacaggaccatatgatgtgctgttgatgactcattcctcagtaaaattaagaagagtcaaactgtagatccactattcctgggcaaacctggttccccaagagtttcctaaccctatccatcagaatgtgacagaaaacaggaaccacaccttaaaaacatcacggtcctggtcgtctaaatttggaatgctggcacgccccgaagactgacttctgcaggtggactagtgaaccctgacagatctcacgttgctgttcagaagacagacgcctaacaataaacaataagagatacagacataaaccattctttgtcatcatttattttgtctatcaactactggctaagcagattctgtgtgctgccctagggtcttaattacttcaagtgctcatattgaaccataaacatgattacctttttgttacgtttccctgtggactttgagccccctagattaaaaggataattacgtaacttggatttctcgaacactggcaaagacaaataatctggagatacgttatctgacctggctaatagactaacagtacaacagttcactatattgtcataatctgacaatttattattttagtattctcctcttttggttgcctcattataaagtctgctttgattttgcctcttcagatgagcccggccctcaaatatacctccttagaggcctgctctctgaacacattggaagtccctatcttagtgtgtccagaattggttccttccagtgagttcttggtctcactgacttcaagaatgaagccacggaccctcgcagtgagtgttaagttcttaaagattgtgtgtctcgagtttgttccttcagatgttcagatgtgtccggagtttcttccttccggtgggttcgcagtctcgctgacttcaggaaggaagccacagaccttcgcagttaatgttacagctcttaaaggtggcgcctctggagtcgtttgttcttccctgtgggttcgtggtcttgctgacttcaggagtgaagccgcagacttttgcagtgagtgttacagtttttttttttttggctttgttttttgtttttttctgagacagtctcgctctttcgcccaggccagagtgcggtggcgcgatctccgctgactgtaagctccgcctcccgggttcacgccattctccagcctcagcctcccgagtagctgggaccacaggcgcctgccaccgcacccagctaactttttgtatttttagcagagatgaggtttcaccgtgttagccaggatggtctggatcgcctgacctcgtgatctgcccgcctcggcctcccaaagtgctgggattacaggcgtgagccaccgcgcctggccatgttacagctcttaaaggtcctgcggacccaaagagtgagcagcagcaagatttattatgaaaagcgaaagaacaaacttcccgcagtgcagaagtggaccggagcacgttgcagctgctggctccagtggccagcttttattcccctactcggccctgtccacgtcctgctgattggtccattttacagagtgctgattggtccgtttttacagagtgctggttggtgcatttacaaacctttagctagacacagagtgctgactggtgcatttttacagagtgctgattggtgcatttacaaacctttagctagacacagagtgctgattggtgcattttttcagagtgctgattggtgcgtttacaaacctttagctagacacagagcgctgattggtgtgtttacaatcctttagctagacagaaaaggtctccaagtacccccctccacccaggaagcccagctggcttcacctctcattagctcccagcaaattaaacaactcattggaactaaatagtccacatactctggggatccacaaacccatatttgcctgagttccaaaaagatggagctgactacttctttgggcagatgttgttaccttggtggggagtggcatcccatgagcacacaattagaaatttcttcctcactttcaaaattcttgctgctaaaactgcatacaacagccacccagccaagaggaattaattcattggctcaggttgttttagataataggatagtcttagattgcatcttagctgaatagagaaaaatatgtataattgcaaataccatgtgctgtacttatataaatggatctgggcaggtagaaactcattagaaagaattagagaacacgacattttgttacaacaggtctccccaactgtccgcaaggactggctttctttgttttcttggattcctcatggaatacagtccatattttctggattgctaaagttaggcatgtccgtcttgctaattttgcttatgctttctatcgtagccaaattaaaatgttgtaataaagcagtgatgaaagcaaataatataatgataattctgcaccatggtgccatgcctggggcacgtgaatatcttgagctacatgctagaaatttatctcctcatttcctggtccctaatctttgtccccattcagcagaaagtagccacagccgtctgcgttcctgtaccccccaggactgagaagtgacaaaagacaggaggaattgagaccgagcaggacccctctaagggtcctgcagggatctcctccccaccccctccaaagcatggaaataaaggaaaatcttgagttccttcaagggaaattccaggcacctagctagctctgagaagtaaatgagcaacttgataagcaagaaggtaatagtagcttaaaaccatagccaaggaagttagagtcacaagatgttccttgtagaatctaaagataacttcttaacatatgtccctgagttgtttttcagaaacccccaccaaatggatccactggagcatagacctcagataagggggaattgaggactgaattctgactgccattcttagttctaaagttcttcctgagaatcctggaggaagccatgcgaaaaagccagggctaacatttttttcagctgatcctaaatttttagacaaagctttgcttccgtagccaactgcaaatcagaaaatctttgcatctacctatgacctgtaagcccctggtttgagatgtcccacctttttagatcaaaccaatgtgtagtctatgtgtattgattcacgagtttgcctataacctctgccttctcatctttaaacccccttacttgcaagccatcggggaggtcaggtcttaagcatgagctgcctgattccgcttacttggttccctgaaaattaacaccctcctttcttccactgcaaacctcagtgtgaatgtttgactttactgcaccaggcaagcggaccccacttcagttctgtaacaggactctctgtttcacaactataaccccatgcctggcacatacaaggtgctcaatgtttgcttgttgactggctgattcattgcatcttacatgttctcttttttaatattcacaacgctcttcgatacaataggtgccagtaggggacatgctgatgagacaattcaagcacatggtcagaataagttctggttaatgtggcagcacaagagaagaacacactgtctgattcatttggaaatcagggatggtgtttaaggaaggggagcaagggactattgaataacagcagctgttgagtgttatgtgcctaacactggctgggcacattgccaggtggtttatgcatattgtctgtagctctcaccacaacactgcaaggtggatgtttcctcagtttacatttgaggaaaatgaggctcgaagagcccaaataacttgttttagaccagtggactgaactctgtaaaacagaatacctggaaaaaatatagaaagacaaagtagaagacaaactatcatatagaaagaagtagaataaagttaaacccctaaacttatgcaattaccacggccaaacactgttggcaagcagcaaggtgtaacaaatagaatatagattccggagttggacaaacttgtatttgaatcccagattcaccatttcctcattgtaaaattctgggtaagtcatttaacttttttagcttcaatgttctcatccataacgtgataagtactttaagggtaagtattaaataaaatgagatgacttgcataattattgatactcaataaatgctgtttccctttcttaatctgtcagtcaaggcaacagaagagacaaagaattacgcaattattattatgtctaaatattgttttaatggttctcaaagtgttgcccctgggccagcagcgtcacctgggaacttgttaggcatgcaaatgaccaggttccacctcacaccgactgtatcagagaccctggggctggaacccagcagtctttttccaggagccccccaggtgatggtgtgtgcaccaaagcttgagaaccgtggctgtggttcattatcctcctggtctctgcaacactgcagtggagggaactgagaagccgagtaggttggcaagatcacaaggttattcactggagacatcattcaaatgcggatctcaggcaagtagtgctcttcttactcggaaaaagaaaaccaatagaggcaggtgccagtgactcatgcctgtaatcccagcactttgggaggctggggcaggtggatcatctgagctcaggagttcaagaccagcctgagcaacatgacgaaaccctgtctctaccaaaaatataaaaaattagccaggcgtgggggcacacacctgtagtcccagctactcgggaggctgaggtgagaggatcacttgagcctgagaggcgagggttgcagtgaaccgaggtcatgctactgcactcaaagctgggtgacagagtgagaccctgtctcagaaaaaaaaaaagaaaagaaaaaaagaaaaaaaatagaacacagactttgtcatttttctgttggaaatatggaactctttgtacctctgtgagcctcattggtggaacttagagactctcataaggcagtctctctgtttatatgtcttttccctacctgaatctacaatataagtactcaatacatcttctgctcactcattgtgaggaaacatagggtaatatatataaaaacatattaaataatcctgaaaaaagaatcatgctcaaagtaaatgcgcatatctgttatcaaggaaactctcttaatagagccccccaggtatctttcaaggactagagcaagttagcaagttagcacttgcaggtaaacagctgtggaaggagagtgatgctggggcctcagtcatgtgcacctgccataggctcagtgtcatggccgtaaaagcacagcttgatgtgtgcccaagcgaggtgtttggcaggttggggttgggaggaactgctatgggcaaaatcacaaatattgtctcagacagctgtgtgcaggtaaactggctgtggtgggaacggggtaccctggttgttttgttttgttttttgagacagagtcttgcactgtcgttgaggctggagtgcagtggcgtgatctcagctcactacaacctctgcctctcgggttcaagcgattctcctgccttagcctcctgagtagctgagattacaggcacgtgccaccacacccaactaacttttgtatttttagtagagacaggatttcactatgttggtcaggatggtctcgaactcctaaccttgtgatctggggtgccctgatttgtagcatttattgatttccatggtgaatactctcactatgggagatttcaagctaccaatggtttaacaatctgcttgcaaagttcctgaatattgaacaatctgctctaggggtgccagtgtgggctggcctcagaatacccctgtggcatcaactatcagtgggcccgattttgactagcaggtggcacagcaaaagccgtttaacaatgctgagtgttcttcaatctgcctgtgtcctgtttagtatctattgtcttaaatatctggaaaatgctaatgaaaataagaggtaagaaaaaaatcactgaggaactttaaaaaaaaaatcagtaccaaagctatacttacagattctgatttaattggtgttgggtgggacctggcatcagctcttaaagcccctctcccaggtgattctagtgtgtagccagggataaataattgcagataatgtgggttagcaaggggcaggccacccctaaacctagagtctattgccatagtgccccatacgagaaagaatgtgttatccccaccttggatatcttttccagctttattgaggtttacttgacaaatacaagttgtacatatttaagatgtacggtgtgatgttttgatgtacgtatacattgtgaaatgattaccactatgaagctaattaacacatccctcacttcacatagttacccgtgtgtgtgtgtttccggagatatattctctcagcaaatttcattattatattgtaattattccaaagctgttttatgtatgtttgacctccccaaataagggaagctcctcagggacagggtcagagcctcctgttagaacatagcagggttgtgtggatggcgtgtcctcagtagatgctacatgctctgggcttatcttcaaacacctcgccacactggaaggatcacagccttctgtagacattacatgacaatcctcagaaggaaaagggaggactggggacacccccaccatcaccagactggggacacagaggcttccccattaacaataataactcaaaatgccctgagctgtgtcccacatgctcgtacttctgtgagttccctggaggtatttcatgtatgcctgtgcttgagtcctctcctgctgaaccctggtttctctagggacttggcacagagcaccccatggccaccagataccaccatcttccatcatatcctgaccctggggcccttgaaatagcaaagctgcagggctttctggtgcaaagtggaagagaggggatccctgaacagtccacggaagctgggtaggtgtgtgaatttgagtgagaggtcatcagagtcgctgccctctttccctgcctcagtcattctgaagggccccttcttgtccattcatcaaccgtggctccttctttgcttagaatgagttctctgaggggaggttccaccattaatacaaatcaggtctggaaagccatcccatcggttttccagacatgcctgagccttgggttggattcaagctgagatcacccctcaagtcacagcagatacaccagtggcagcagtcggcacctacaggacaagcaaggtgcatccagaatctaaagataaggctcccctgtcagaggaaaacccatacaagtgaacacttcatagatgaaactggccatctgtagaagtgatctgcctgatgaggcagaaaggaaaggggagaaaactaacattttctgagcacaattttctagattttttatatattttggcactgagtgctcacaattcccttaggtaggtaaaattattcccattttatagatcaagaaacagaaattcaaagagatcatgtggctgactttaatctcaggtatatttggtgccactgatctattttctgcccctctaggtttgccttttctggaatgtcaaataaatggaatcacacagtatgtagcctattacttctgtaggtatttttgcttctttcacttagcggaaggcatttgaaaacaacccatgtttttgtgtgtatccatggtcgatttctttctaccgctaggtagtatttcattgtttgggtgtgccacagtttgtttatacattcctcaactaacagagatttgggtagcttccagtttgggcaattacaagtaactataaactataactatagactataaataactataaacattcatgtacaggttttgcatgaccatagctttcatttctccaggagtgaaattgctgggccatatggtagatgtatgctaactttacaagaaactaccaagtggtttgtaaagtgtttgtagtctttttgcaatcccaccagagatgtataagagtgctggctactttgcaccctagttatcatttggtattgtcaatatttgttattttaggcattctaagagatgtatagtgatatatcatagtggttttaacttgcattttactaattaccaatgatgctgagcatcttttcatgtgcctcttggtcatccatatatcttctgtggtgaaacatctgttcatgtcttttgcccttttttccctcaaaattttttactgtgttaaaacacacataccaaaagatttatcatcttaatgtttttaagtttacagtttagtggttctaaatatattcatgatattgtgaaactatccccactatccatcttcataactctttccctcttgtgaaactaaagctctgcacccgttgaacaataactccccatttccccatccccctcgcccctggcagccacccttctactgtctctgtgattttgactactctaagtatacctcatataagtggaatcgtacagtatttgtcttttgtgagtgcttttgccctttttaaatgtgcttgctttctgattgttggattttgagagcactttgtatattctaagacacatgtcatttatcagttatgtaacttgcaattatttatgtctttccattctcagaacagtgttttgttttatttttgtttttcttgagagagagtcctgctctgttgcccaggctggagtgcagtggcacaatctcggctcactgcaacctccgcctcccgggttgaagtgattctcctgcctcagcctctggagtaggtgggattacaggcgtgcttcattccagccacgtggcccttcttgcttcctctaatatgtctattacaggtctgcctcaggacctttgcacttgctattgcctccatctgaaatgctcctcctccaaatatcctcatgactcactcctccattcattctctgttaaatgtcaccttacttaagagaccctccctgaagactctatttaaatggctccccagctccatcttgctctgctgctccaccttgatttatttattctcatggcgtatatcacaatctgacataacacgtatttgctcatttttatttatttattaactgtatattccttcccccaacaactatcagaatgtcaagctggagcgagcaggaattttgtctgttttatgcactgatgtatctccagtgcctagaacagtgcctgcacatactgaactcttaatcaagagtcctcgatcttactgaacaaactcaaacaattattacagcgtgcctactagggaccgggcacagtgctgggcttcggagatacaacggagagaaaaacagacatggtccctgccttcatggatctcacagtacagcaagaaagaccaatagtaagtcatcagagaaataaaatgggtaatagttcctgggcctacaagaagtacagtcggccctaagtatctgtaggttccccatctgtgcatacagccaactgtggatagaaaaatattttttaaaataaataaataacaataaaaataacagtacaacaataaaaatgtaaataatagaatataacaactatttatatggcattgacatcatatgaagtattacaggtaatctacaggtgatttaaagtacacagaaggattgtgtacattctatgcaaatactgtgccatttcatataagggacttgagcatcctaggattctggtatccatgggaggtcctggaaccggtcctctacggataccgagggacaactgtacacagagctggggagcttgtaacttagtcataagggacctagtcatggaagtgagagaagggctcccagaggaaatggtgattgaactgagagctgaagagtgaacagtggctaaccacgtgaggaacagggagaaagggacatctagccatgtggcatttcatgtacaaagaccccatgcgtggaaggagcttagcatgtttgaagaactaaaacatggtgagattgcctaagggtggtgagttgggcaagagggaggctgcagtggggctggggtgaaggcagggcactctggggctggggcaggcaaggtggcgatggccaagtagggactggcctttaccttatgagaaaagggaagccactcaagggtgagctcacctttttaaccacccagtgtatgtggaacataataaacactcaataaaacactaggctaggcatggtgactcacacctgtaatccacgcacttttggaggcccaggtaggaggattacttaagcccaggagttcaagaccagcctgggcaacatagtgatacctcatctgtagaaaacaaacaaacaaaaaagcctggcatggcggtgcacacctgtggtctcagctacttgggaagctgaggtgggaggatcacttgagctcaggaggtcaagactgcagtgagccatgattgtgccactgcactccagcctgagcaacagagtgagaccctgtctcaaaaccaactaactaaataactaactaactaaataaataaaacacttgtatgttgaaaacactcttagatgttagtggcagtgtaaactggtcccatttctctgtagggcaatttcagcacatctttcaaaattacaaatgtgtatacattttcacttagcaattctgcttataagaacttatcctacagatgtttgcccatgtatgaaaagacatttgtacagggttattcactgctgtgttgcttataatagtagaagaatgtaaataaaccagctgtcccttaataggagattactgaaaaagttgtgatatctctatgcagtggactaatatgaaccataaaaaaatgaagacttctatgcattgttttgaaaagaactccacgatatattaagtttttaaaaatcaaaaaagagagcaccagaagaaaagatgtacagtttttctatacataccatatctctgaaaggaggcataagaaactggtctgttacttccctctagggagggaaatcagacaattgggactgggttaggagatccttttactgaattctgaaccaggcaaatatcttacctattctatataacaaaataaatttacatgataggaattatggattaaataaactaatgagttagaaaattaatttatcttttaaacagctttcagccaaaactcccctctgctattcagacagaaaggatttagggagtcctggcccctaccccactctctgattcctgacacagcccccaaagggaatccaccaacagaggggcctttggaaagggaggttggatgaaagtatttgttttggtcaattgcatcatttccaggaaagggcctccattttaccttgaaatcaggctgtctcaggaccccacagaaacacagttcggggactttcccaaacttgtttaattaggcttcttgctgaaaagctgcgctgtgggtctctaaagcagtaactggcctctagagatgcaatcatctctccacagggaactctcatgaaaaagtctgatactcagtgctttcctgaataaaaataagcatccaaaagtatttgcaatatcaggaaaagcagaacaaagcgggtaaggctggaatgtcttgagcttctcaactgcaatgaccaaagagttgatctgtgagttctgattaaattccagtaaaaagggcacttgacagtgagggccactcaatttcatcaccctggcttgatgacagaggatgaaagagaggccaggggctcacctccagaaggagtttcctgtccctctgggtgggggaagtaggctcccggtgctgatgaagggaggctgctgtgagctgtgccctggagtcccctctaggaagtctgaggcacagaccaggagagagggcctaggagggaccagtaaaggacgaagcaacagaaaagagtgagaataagtgaaggatgggaatcttcaacccgcagcctctgtttgttctataaagtggtcatttgtataacaattctatggagaaggattactgccctcagcccccacccccattctactgatgaggaaactgaggctgagacaagtgtactcgcttgcctaaggtctcacacctcactagtgtccaggtcaggatacgagcccaggtcactctgatgccaggatcccttctcttgcttccagggcaactttaatataatcagaagaacccatgtttgagtcaacaataaacatttagctctgaagaaactgtgccattttccttttaaatattatatcttaatatgctattggtacaggcgaataatttccaccgcaaaaacaaagaagatgaattcctctttttttctttccttctcgcctctcctatgagctggagggggaaactcaagtccttttaccagttgacaagacaaaagaaaatacccaagatccccagcatagccagagttcctcttggaggcaggatcagactgctgcagccacttgggccattctagatgccaaaagctttcctcagggacaacatttggagtcaacaccagtatattttccttgctggggctttctataaactgtgtctttcgcctcacctgaagacaaaactggggaaaacaaccttaccttagccatgcagacttggattagacacagcaaagaacttcctgacaatgagtgatggatgtgggatcaaaatatgggtaattaaggaaggacagacttggaataagttggttggtgatatggtttggctgtgtccccacccaaatctcatcttgaattgtagctcccataattcccacatgttgtgggagggacctggtgggagataactgaatcatgggggcattttctcccatactgttctcgtggtagtgaataagtctcatgagagctgatgattttgtaaggggtttcccctttcgcttggctctcactttctctcttgtcttctgctgcgtaagacatgcttttcaccttccgccatgattatgagacatccccagccacaaggaactgtgagtccattaaacctcttttttgttataaattactcagtcttggatatgtctttattagcagcatgagaacagactaatacagttgggaatgtgccgtgcgtgtagtctagacttagtggattgaggttgagctgatttgttgattatctctcaccatctcctgcaagcaccctgccatctagtctgagtctcctcccaggcccacatttaattatacctctagctgaccccaccatctgaaatgccttctcctcaggtgagacaggactgcctcaatcctgtctgcctttcaaggtatagctcaatttcctgggtctgctcgaagctttctctgaccactccagcccatatcaatctgcccctcggaattctaggtagtctgggccttagtcatggtcatctgggtagagggtagctggttcctgggaagccggatgggggtgttgttatcagagagagagggaaagggcacgggagagaagaaggagtgactatcatagctgtctatcctgaaacacaagctacatgatgattgtccactctgccatgagcctgccacaccaaccacatgacagctgtccactatgccatgagcctagcttgcctagcttagctacaagacaactgtccatgctgctgtgagcatgccacaccagtcacatgacaactgtccggtttgcctcgagtctgccacatgcaatcatttgacccacatttaccttccaggtgggctcttctgggaagaggggtcctgaaagcacacatacatatttgccaacaacatttcccaaacaatgtcaaatcacgaagttagcactctgaggcacactcatgttatgttggtttgcagcacagctagcttctctagcatccaatcaccctgctacagttatatgttaccgcttgaaagatgcactcgcatataagatttcgttttatcctcataacaactccataaagcccatcttatagatgagaaaacagactcaggcagagtgggtggtttgtgccagttcacatggctaaaaggcagcagaactagcactagagtccaacctcttcagcccttggccagggcacttttcatgataccatccatgctcatccccaactctgcccccacgaggtgcacacagagtgggcattccctgtattaccaattgacaggtgaccagctggtcaatgttggtgccagttagaattccgacttctgaccataacacagaaatactcctactcattcacatattggtctcgcattagtattctattgtccatataccctatacgagagcatcagattcacctcaattatttcctgcagttcacaccaaaagcaggagatggaccagcccagcacaccaggctccgggtgccatgcaccttctgctatctaagctgagccaagaaaccccaaactgtccatctctagtcactcggctgtcttggatgattcctgacctgccctccttcaggctaatctcagccagaccccaagaacttgactccaagtttttgctaaaacaagcttgcctctgttctctggtctctccagcatctgactcttggcttttccagatagactttggcttggtcttgcttcctggtaccagaaaacagggtgcaatgggtctctacataaattaattaatgttttcaaggtgcttggaacagtggctggcacatagtaaacacaatataagtgtttgctattgttatacctgcttagaatactacatcccaaacacttaatccaggcttcccaatcccttggtataaagtcccaaaccattgcacagctctggctgagctctctgaggtcatcgtccatgactctcctccttgtgctctgaaatacctcgacttcctttaggtccatgaagatgctacaccctttccaccatagagctttgccttgctgttttctccattaaaatactcttcatttcctgaccccatcccgcttccatccccctgcccaaaaacactcatcgttcaattcttagctggaatcttacttcccctgggagatcttccctgtgtccattcaccgctccacccatcaagattaggttggatctccatgttacactttcctatagcatcccttagtgattattctaaatgggcatatagttgcttctttcatgtttgtcttccccctggactgtaagcctcatgagaacaggaaccgtatttaaagatgcattactgtctcctcagtgcctgccacaatgtttagaatgactaggggctcaaaaacatattgaattgtattgaactgaatcaagatggaatgaaaaatgatagtggcattgatgccaatgaaaataatgaacttaaagcttactgcgctattatttatttgctagatttgtcatgacctgctgaaaaccagaaccttgaatccaatcagtaattaaagggtgaagaatggaggaaacaaattataaaatcaatacttctttgggcaacagcatctttaactattgctaccatttcattcattaaagctgaaagggagagatgagggtcccggttatcagggatcaaatgacaaccagcaagttactcatccctgattggtcaatccagaaggcgctgaactttgccttgtacacaaagacattgcctggcattatcagtgctgccatttgaggagtgttgagattatcttcaccaacccaaacaaatgtgaaacaatgcacaaggaaagtaaagggaacaacagctcacccgccttttcacagtgatggtttctgtcttccagagcccaaggttcaactcacttccagtcaacagggacccaccaagtccctctctctgcctacaactgttcattgagtaacttctaatttggatgatgagcacttgagggctcactccacaacatccatcagtcctgattgttcctagtagtttttcccactgacagcagcatcatctactctctatgaggtgccctctggggtctgactcaggctggatgacacagctgggtgattgattattttgatgcagacacacaactttctgcaactgtatttctgccttctgcttcccagagccagaacctttcccctcaactttttctttttacttcatccacagtggttgtgtaaggggttttagccacccataattctatcaggccactccaaagcaacctcatataaatatgcagtccataaaaagcaataagaggccaggcacagtggctcacgctgtaatcctagcactttgggagaccaaggctagcagatcacttgaggccaggagttcaagaccagcctggccaacatggcaaaaccccatctctactaaaaaaaacaaaaattagctgggtgtggtgggacacctctgtagtccctgctactcaggaggctgaggcaggagaatcacttgaaccctcaaggcggaggttgcagtgaaccaagatcaggccactgcactccagcttgggcaacagagtaagactctgtctcaaaaaaataaaaataaaaagcaatatgagtgctgcccaaatgaacttgctgctcccctttcaacctgactgctactccaagtcccttctatcaggagtcatatgtcagcaggcaagtgactcatctctgatttgccaatgcagagggtgctgaactctctgccctgggtacaaggtattacctcgcactatcagtgatgtcatttcggaactgctgagaatgaacagccaccaccgcccatagtagccaccacctggccaaagaacctgattcatatgcagcaaattgacagagtgttggaatcacacagacccagtgtcaatcccagctgtaccaccttatgtccgtaagaaactgggccagtccttcatttctctgagccccagtgtcctcatcagaaaatgaaaacgacagcacctcttcatgtggttgctgccagaatttgagataatatacaccaagtacccacccagcacctggctccatgttaagagtaatatccactaaacatatgtagaaaaagtgagcattagatgaaacaagtgcaaggaattttgcaccaagagatgacagaattcttagggagaaatccatgtgacctgcagatagagttcaagaaaggctttgtaaggggtcagcatttgagcagagccttgaaacaggggcgaggcatttggcagatggactgggggaggagggcacgccaggcaggggaacagcacaagcagatgctaggaatggagcccaaagcagccgtacctatttgggcaggtaacacaatgcagctgaagcacagtgggcagtgggtgggagcctcaggacaggaggctggggccaagaaggaaatgggttggaagggccctgcagagtcactgctaagttgtagggatgtacaatatagccagagtcttgtcagcaagggtcatgtcaggataaatcaactacaacagcaattagataatggaaaaacgaatatcatattttcaaactccaccatttaaggctctctgggctgttggagaccgttacatcatctgagaggtggtttcttaatcagagaaggaggcagccctggagggaaataatgctgaggctgagttaggcgagctgagtcctctggaggcatgttatacagatgcgccaaggacactgtgaagtccaggtctcatcaagtcctagaggcttggctgccaagtcagcccccaaagtaaagtcacaagtcctaaaaaaaacaaccttggagattctctctattcaacccttactgtgttcttaccacacgtaagaccttgcttttggcctgagaggcacaaagatgaacagagcatggtcagcctctgtcccacaggaacttacagtgcagcctcagtgcctggcccagactggcacccacagtgactgcccgaagactggcaaagaccagcacaggctgggcaggagaggctgggtgaggctctcaaaaaccagaagcagggtgactacactccaggaggggggccatgggcccaagtgcctcctctccactgtcctgatgcctaggggcctttcctctgttattatacagagccacgcttcacttttacccatgctggcggctgtctataacaatatataaatactgagctgtttttcattaaagaaaattggggcaggcgcggtggctcatacttgtaatcccagcaccttgggaggccaaggcaggcagatcgcttgagcccaggagtttaagaccagcctgggaaatatagtgaaactctgtctctacaaaagaatttaaaaattaaccaaggcttgtggtgcacacctgtaatcctaactactcaggaggctgaggtaggaggatcacttgagcctaggaagtggaggttgcagtgagctatgatggcaccacctcactccagcctaggtgacagagcaagactctgtctcaaaaaaagaaaaaaagaatgaaaaagaaaagaaaattgaacaaatccagaaaaatagaaggaaaaattacccagaattttagcaccactgttttgatggctctctctttagtttctctctctctgcataagcaagtttgttttgatgttttatttgtaaataatcacactgtatattcaattcaattttgtgtactaccttttctcaggagcatcttgtcatagacagttttctttttattaaaaattattttgaaattatcagtcttacgagcctcatgacattttatcacacagttatatcggagttcacgggtcctgtacgtttgctgcactgagagctgtgtagtgtcccatggcgggcacaggttttgtggttaggcagacgcccgtcctctccaaatcctattctgacacttagctgtgtagcttttaacaagttacgccatctctctgagtctcagctttctcatccataagacaaagatatcataatcactttgcatgcttttttttttttttgaggatcagaacttaatacatgtaaagcaactaaataaagcaaattagattactagaattgaccagtgtgtgtcttaaactggaagataccaattggccaagacacaaatctaagcaattacagtcagccctccatatccacgggttctcatccgcagattcaatcaacctcagactgaaaatatctggggaaaaaatggacggttgcatctgtactgaagacatatgggcttttttcttgtcataattccctaagcaatgcagtataacaatgacagttaacccttgaacaacacagaggttagaagcaccaataccccatgcagtggaaaatccacatgtaactttcagctccccaaaaacttaactaatagtttactgttgaccagaagccttaccaataacagagacagtcaactaacacattttgtatgttacatgtatcacatactgaattcaaacaataccgtgagctagagaaaagaaaatgttattgacccatttatgcctgaggttgcaattttttgaatttttgcaatcagaccttgagcagtaggatataaataactcccacatgcttagcattccaataatggaacactgggcataaatagttaagaaaataaggaagagaaaatacatttcctattcactgagtggaagtgtatcatcacaaaggtcttcaccctcaccatcttcatgatgagtgggctgaggaagagggggaagaagagggatctgtcccactgtctcaggggtggcagaggctgaagaaattcgtgtataagtggacctacacagttccagcgtcagccgtatttacatagcatttatattgtttcaggtattataagtaatttcaagatgaggtaaactatacagcaggttgtgcataggtcaaatgtaaatactatgccatttttaataagggacttgagcacctgtggattttggtatctgtgggggctactggaaccatgcctcggggatggctgtacatataatttagagccaaacacaggcacaggcacaaacaggttcttttggagtgagagccctgaaaagaaccaatagcactttctaggcagctattccaagggtagtggtgtaggaggaaccaccaggctttggagctagacagtgctgggtttgaatctcacatttaccctagtatgtcattgggtgatttgtttaacctctgagcctcatttttttttaatcagtggaaataataaactatgactttgtgaagattcagtcgaatgaactatggcatgaaaaatgcttgacactgtgaccagaacagatgcttaatgaatcctcccacccctctcctcccttagggcctttctggttttctggtgctgagatgatgaacactggtgctcctcctggatttgccccataccaccccattcaagcctgtttgtgctgtggtgtccctcactatgcattggggacaataaccgccattgcctccttcacacaagggacaggcagtcaacagaaagaacaaaaggggccaggcatggtggctcatgcctgtaatcccagcaatttgggaggccaaagtgggtggatcaccggaggtcaggagttcgagaccagcctggaaaacatggtgaaaccccgtctctactaaaaaaaaaaaaaaaaaaaaaaggttagctgggtgtggtggcgggcacctgtaatcccagctacttgggagactgaggcaggagaatcactggaacctgggaggcagaggttgcagtgagccgagatcatgccatcgcactccagcctgggcaacaagggtgaaactctgtcaaaaaaaagaaaagaaaagaagctgggaggctcctttgagaatttcttcccattccccaggccgggccccccagtcaaggctgggcggataagaggattcagccaaccaactccaagaagggacaccccagggacactcatcatagggtctcctgtcccaagtccctttcttcagttttcaattatagtcttttaccaaaaaatcctttaagaggctctcttgctggcattcctcttccctctctttcctgcctcttgtcccctcccttatccccctcccttttctttccttctcttacctctcttctcctctccccttctctcctcctttgcctttctcctctctttccttcctcccttttctctctcctctctccccaacttccttaccactgtttagtatttcccctcttgcaccccctttttcttacattctcttttctcttcaaaaagaggttcttgagagggcagagcccccagactctctatcagccagggtttggtgtggagaacagaaaccactctaggcatttcaagaaggggctcactccaggaaattaggttcataaaaacccatcagaaagctggagaagcaatggtcagggaagccactgctgggcttcaagagatccggaagccactcctgctgtctaggccaggggccagaggaaaccatacctggtgatgacagctacccaaatcaccaggtgggagagccacatgggatccggagagatgccacatctcctgtctgccaaagcccacacctctgcctgctgatgccgccacctcccaagtctcacacaagggcctcctgagaggctagcccaggaggaactgcccagcaagagagggcaataggaggggacccggagggcatgaccaagactaaatccttgaggatcaagagaaagagtacccaaataccaatctcaagcccagacagcaagaaactccaaggtctagggtggagatgacagagactgggagctcgggcgaatggcataggaattaagggcactggcttttaattcaaccccagttcccctgctcaccagctgtgcaaactgctttacttctctgggccttaattccctcatctgcaaagtgggacttataatagcacctacttctcagagaaaattgaagtaaacaaagcacttaaggcccagtgcctggcatgtagtaagcactgaaaatacagtaacattgtacaaatcattccaaagcacctgtcccaccttctctttgtctctaccattaagaggaaatgatacagaggggggctacctgctaacttttgttttccttgcaaaacctgaaaaggtaacattttcaaaaatccatgtctgcagcaatgtctgacccttcttcattttgcttctgaaggtagagtaagttgggtgactgccctcccttggccatggaaaaagctaaggcataaaggatccaaaatcctattgatgatatttggaacattttcttttaattatacagtaaattgacttctgggggcagtggacaagcctgtgaattttaacacatgcagagattcatgcagtcgctgccacaatcaggacacagacagccccaaacactcccttatgaaatccctctatagtcacccctgccttcacctccacccctaacctcaggcaacatgctctgttctccaacatggtagttttgtcttcatgagacggtcaagaatggctctattatgtgtgtaaccttttgagactggcctctttcactcggcataatgcctttgagattcatccaaattggttcaggtatcaatagtgagtttcttttgcttgctgaattgtattccatgtttgtgctgtctgaagagaatattcaaacatccttgatgctgttcctttgtgaagcccactttggtgaaattcaaagcaattgattcagagtagcaaaagatgtattctaaaagaattttttggccctgtgtggtggctcgcatctgtaattccagcactttgggatgtggaggtgagaggattgcttgagcccaggagttctagatcagcaatgggcctaacataggcagggcctgtctctacaaaaatattggctgggcatggtggtgtgtacctgtagtcccagctacccgggaggctgaggcaggaggatcatttaagcccaggatgtggaggctgcaatgagctgtgattgcaccactgcactccagcatgggtgacagagcgagaatctatctctcaaagtaacaataatatttagccatatgctcagctctaaaatatttactctaggagagggtgacccccagaagcatataacctaattgggctgtgcttccccatttgggagataatcaagggagaggggtgcagggagccgtcactggcatctagccccacttgttcctcctgcccctagcagggttcagggctgcttcatgtggtctacaggccaaatggatcttcagcaacagcctccaaagccaaactccatgcctccatctggtggccttggtctcagtagctgatactctcctagtgccccacttgaagagggcttgccacagccctgggcttcttcactgccacgtgcgcagtgctccctccgatttcactgggatcggcccattgattcctgtaggcgctggcttctcctgacatgactccgtgtcattcactgacagaagaaggccgtctcctgaccagttataattcttttatcagaatccagcagaaaggggtcttgctcttacagtgtattataacacccttgttatttaaaatcttttccatggccaggcacagtggctcatacctgtaagcctaaacttgaacaacctaaacatggactattactttaaggggtcaaattggagggatcgcttgacaggagttcgagatcaacctgggcaacatagcaagaccttgtttctacaaaaaaatatattttttccatgattttttgctttctttcagtccctgacccaaagatttccaaaaatatgttctcttggaattgagtcaaggaacaattttagtgttacatctcaatgtttcttccaaaatttcccctccttcaactagtgcccaaagactgactgactaaagaatcttgtttctctcttcccaaaatatgcgttcccagatcattgtgtatagtgaatggtctctaaagatgaccaccatcaatgcctcccctcattttataaccatgccactctttccatcaagagacagactctatttcctctctccttgaatctgggctagttctgtgacctgttttaaccaatagaatgagacagaagttcctctccattcctagcccttatgagaatgatagaggcaggaggcagaaaaatgcctaggcagataggatgggtctccggggaaacccaaccttcaagaaggaaacagtcccagtaaatcctcaaaccggattgggaactggctttcccatttggcacactttcctctgattgatccccatccttcacctatttacacatacccaccctttcctaattggttttctacactatcgtgcccacctttgagtggtgtttttgctttaaccttttttgcacactcacaaaccaatcagcatgtactccctattctgaggccataaaaagccccaggctcagccatattgggaaccctcctgccttcaggtaggggaaccaccccagtgtcccctccctgctaaaagctgtttcatcactcagtaaaacttcccaccttgctcactcttcttgtatctgcatgcctacttcttcctggtcatgagacaagaacccagacctagctgagctaaggagctgaaactcctgcatcaaggatgtgaaaaggcctaggttctcatgctctctaatgaagccaaccaccatactgtaaggaaacttgggctagacttctgaatgagaaaccatgtggagagaaagaggccacacagaggaagatcaaggtgccagacatgtgagtgaagccttcctgaaccttccagcacagcacagccaccatccgtctgcagcagatcagtgactcagctgtcactacatggaagaaagagccaatccagtcaagccctggattcatgtcccccagaatcatgagaaacaataagtcattgatattttatgccactaaattttgaggtaacttgttacccagcaatagataacaggaaccctgggagacaaacctccaagtgttcaagaagcagctgttgcccttgctccagcatctcagcccagggccaactatgtttcaacttgcctccgcggctcccagaaaactttaagaattttcatgcaaatagaatccctgaaaacttctctcacatgccctgacatgccagcccccacatgtgacataaagatgtgactccttttttctcccctcagatttcttttctcaattgtgatggagattttaggaagatgtcaaaatgagttggttcttcctaatcaatgaaataatgcacaaggggcagtggtcagtctgcaagcccaaactggccccagacaactgccagggtagggagactaagagcagggacccctcttagggacctgcagggatcccccaagcgtggaaatagaggaaaatcttgagttccttcaagggaaattccaggcaagtagctagccctgcaaagtaaatgagcatctggataagccagaaggtgatagtagcttaaaacagtagtgaaggaagtgagaatcatgggatgtttggtccccctatagaaactaaagatcacatcttaacacatgtccctgtgttgtttggcagaaacctggacctccaccaaatggatccactggctcaaagacgtcagatagggaggactaaggaccaaactctgaccactgttcttcatcattctaaatttcttcctgaggggcctggcagaggtcacgcccctgggccagaactaatattctgctaatcccaaagttttagacaaaactttgcctctttaaccaattgcaaatcagaaaacctttgaatccatctgtgactcctggctaccccctccctcctgctttgagatggccctcctttttaggtcaaactcatgtatagcccccatgcactgatttatgacgttgcctgtaacctctgccttctcacctttaaaaacccttgtctgtaagccatggaggagttcaggtattaagcatgagctgccccattctccttgcttggcactctgcaatcttgatgccaaggttggactttattgcaccaggtgagtggatcccagtttggtccaataacaagaccatgtgcagttaacaagcatggcagttacattttattgacccgtggctgagtgccaggcactagctaagcacattatagatatcatcttattgggttctcacaacttccctgagagacagctatcctaacattgagttaacaatgagttaacatttgtcttaactcattttctggtttgtgggaatcatatatgagccagagggagacacctccgtctagtccagtccttcagccaaaaaagatgcccaggaaaattttgtcttttaaccctgtgcttcccaacctgtttcatgccctggcacacataaaaagtgacaataaatttggggtacactgagacaaggggttgaggtggaggttcccagttggaaaaatccattaagctgcttataatccaaaatgcattttcctaaatccttttaaatctcttagacctctgagagggggtgagaataaaaaaaatttttttaacgtaatttagtggagataggctattgtctcttagcaccttaggaagagcagacttcaacctccagaaagggcccaacccaggccatgttcattcttgagatgcaaccttggacaagtgacttggcctctcttggcttgtttctctctgcagaggtgagaactcccccataggattataaaggcaggagatgaagatggcatcgggattggtcctcgggccaagtagaaaaactcaacctcagatacccctggagacaaagacaattgtttctttcaatagaaactactcggccaggccgggtggctcatccctgtagtcccaacgctggaaggctgaggcaggaggatcgcttgagcccaggagttcaagaccagcctaggcaacatggcaaaaccccatctctacaaaagatacacagatagccaggtgtgatggcatgcgcttgtagtcccagctacttgagaggctgaggcgggaggactgcattaacctgggaggtggaggttgcaatgagccaagatcgatccactgcactccagcctgtatgacagagcgagaccctgtcttgaaaaaaatgaattaattaattaaaagaaaaagaaaataaactggtcaaggaggagggaattttctagacattaatgacggtttgggtggtaccttccagatgcattggaatttatttggttttctcctgatatttgctttcttttgctttttagccattttattgagatataattcacataccatccaattcacccatttgaagtgcacaattcacagatttttagtacagtcacagagttgtgcaaccaccacaacaatctaattttaaaatgcttttatcactcaaagagaaaaaaaccccatcgctattagcagtcattctcattcctccccacccctacccccagccgtccctagcccttggctaatctactttctttctccatagatttgcctgttatggacatctcatacaaatggaatcatgcactacatcttttgtcttttgtaactggcttctttcacttagcatgatgtttttgaggttcactcatgttgcagcacacgtaatacttcatttctttctcttgccaaacaatattccattgtgtggctacactacattttatttatccattctttagtggaaggacatttgtactgtttccttttttggtttttatgaataaatctataaacttttgtgtaaaagatttttgtgtgaacatgttttcattttccttgggtatatacgtaggaacagacttgctaggttaattagtaactctatatttaacattttaaggaactgccaaactattttccaaagtggccacaccactttacattccaaccaacagtggatgagggttccagtttctccacatcctcaccaacacttgttattatttcttttttattatagccattctactgggtgtgaagtggtaacacattgtggttttggtttgtgtttccctgatggctgagaagcatctcttctgtgcatattggccacttgtatatcctctttggtgaaatgcccgttcaggtcctttgcctattttggcatttggtttccatggcgtgtttgcccttttaatgggagtgttaagctgggaaggtggatagtgcttgattaatgcttgagttaacacgagtggatgagaagggctccctacatttggagaagcttttgtttggctatgaaggcctggggtgttttccgtgttccctgtgctctccctctgttcgcttttaagccagggttctgacccaggttgtgttctgacccaggttgtgttctgacccagctaagtatgcaagggaaaaaaataggggcttgtgccagagatagcatgaagtcaacactgcagcaaagatgaagacaaggataggatgtttgtttacctccaggcctggaggctaaggctggattggcaagttgtcctcttggacaattcctcttaccttctcttactcaagaactttaaagattagtcatgttaatagaaagatgatggtatcagaaaaacatgccaaggaattcacagtttctcagccagacttgttagcaacaaaagttataggtagtggtgtatctgtgtgtgtgtgtgtgtgtgtgtgtgtgtgtgtgtgtgtgtgtgtgaactaacgtctataaataggaaacaacttttagaaaaataatactttaaaagttgagacatgaaagaaacttctggattactgtgtgtaatcatagccgcctaaaactgatggggccacccatttccagaagccatacagatcaataaaagagcaaattaaaccattcataacccagtccagatggagatatagatgggattctccataaataggaggtgttcaatgtttgttgaattaaagaatgaatgggtaaatgaatgaatggcacactgcagaggaaatgggcacgccctacctttggggcccaactgcaacccatacagagccctagcacttctcacactgcatagtgtgtacgggattaaaggtctgtctaccactggacagtaagttccggaggcaagcactgtgacgtattcattcaacaaatgcttgtgaagctcatgctatgtgccagacactgtgctgggtgctggcaggacgagagtggtgaactaaaccaagtccttcctgtggagctcactgtctatggactgattcttccttcgtgtcctcatcatctgctcagtccagggatgcagtagacgctagtaagtgttcctcctcctttgctcaccagattttttttttgagacggagtctcgctttgtcatccaggctggagtgcagtggcgcaatctcggctcactgcaagctccgcctcccgggttcacgccattctcctgcctcagcctcccaagtagctgggactcaggcacccaccaccatgcccggctaaatttttctgtatttttagtagagacggggtttcactgtgttagccagtatggtctcgatctcctgaccttgtgatccgcccaccttggcctcccaaagtgctgggtgggattacaggccaccgcgccaggcctgctcaccagatctttaaaggaaatatttgaagctgttccactgaaaaacattttttcatttcttcggagaggctcaaaagcaatcttgcagcctctgagcagttcattagcagattcctttaaccagctccaaccctgtaccctgcttctgattcgttgttgaaaccatgtgcctttctggggtgaccttgtgcctgcctgctccacacggtgctcttcaccctgtaaggcactgttctaaagcctctcagcatctcgaacttcagtcacccaccccaagttaacaagtttactccctcagggcaaatcggccacagctatggttccccatcatcgcacaaagggtgcctgttttgtttgatttggatgctcaagttaatccccacccactagggaggcaaaatggacaggttcatttcaagaggatgggaggaaggttggatttcagcacttggtaacttttactttgggggaaatcctctctctgcatcaagacaaacttcctggaggaagtgcctgccaactgtgcagtgagggcaagtgttccctcctccaaagcagctcccaaccatcggcggtaagacttagccaagaaatactcaccatctcccagcctttctcattactagaaagcagtgagaaacaaacaaatgaaagacagacatcacagtttgcctgcgatcatcattctttccattcagccagcacttaagagctcacagcctgggcagcagacacacaactggcctggagggttctgcaacgactaatacctggttcctggcttcaacggcttcactctttggtggaggagacaactacataaagagttgattacaaaatcgcccctttggagaaggtccaaactccttagcaaggcctgcagggctctgcacgatttggttcccgtggtgtattcaagcctcatcccctccacctccacccctattttctccacccaccatgatgtctcaaccacaccaagcagcatgcgagtccctgaacaagtggtgctccttggcctgaaatgcccctcccccaagctagcaaagatgcctctgtccccttctctgacagaggtttcctctctgcagcagatcccaactggaaaaagggagatgcctgaaccttaattcaagttttgaaattttattttcctgagactggacatttcacttcatgcattgaaactgttttgtgacttcaaagtagccatagctttgggtttttaaaatttaagtccagccagaaatttttgaggctttgtctcagttttcatccagggacagggagaacaggaacctccagaaaaaaaaaatacaaaggaattgtgagagaaaaagataaatctatgttatgatcacatcctacgagccacagttgctcaacctccaggcaacccacgtctgtctttcccttagactgtgagtcccttcctgcgtggagggaagactgtgcagtaaatggtcaatgaagatggggtgggcacaggggcgagaaatggaactgcgtagggcgggacaggctctgccccaggaagcatgtgctggtgtaggactcaaggctagcactgccccaggagtcagcctcagatatgcagggtcttgcaaagaaggcccttgagggttttaacatctgtcttttgctacacagataaacccagaaactttataatgcaaatgcaccccagaaaggcaatgtgagtccaaaggagtatctaagtgtgggcaacacgtgtcaaatcctttcctgctgacattttgcttgtacagtggacaccagggagagccgcaaggacccacctaaagagaagcatcagctgggcgcggtggctcacacctgtaatcccagccctttgggaggccaaggcgggcagatcacttgaggtcaggagttccagtccagcctggccaacatggtgaaaccccgactctactaaaaatacaaaaatcagctgggtgtggtggcatgtgtctgtaatcccagcttctcaggaggctgaggcaggagaatcacttgaacccggcaggcggaggttgcggtgagctgagattgtgccactgcactccagcctgggcaacagagtaaaactccatctcaaaaaaaaaaaaaaaaaaaaaggaaaagaaaaaggagagaagtgtcatcaccaggtaaaccaaagacaagagatggaggccacatggctgacagcccatctgtgtgcactgccgtaatctcaccagcccatgggatgtgcaacctgtagcagtgagaaaagtgagcctgacaggttaacaaatctgccccaaatcacaccaccactaagtgacagactgggattcaaattcaggtgtctgtatctccagagccccctccagcaggccacactggctgactctgggtgagaccttcatctccttcttccatttgcttggaggctactctgtaaaccttcaactctatgcatttgagaattgagaggagaaatgaaggacccatacgcatggtccacgcagggcttggagtagtggaagtcagagggcagggtggaaggcaaggctgctgctgaggatgggaggctctcccaggcttcaacagtgcccctgtgtgcacagtgctgtgtgcatcctgcctcccctaccgtgggcccctgcatgaccgggctcactaccctctgtggcagcacaggggctgggggagagcagccaacacactgttcacccaccccaccccttgctggctccctcacaggccagccacatgctggagctaggcaaccactgtctgacatgtggcaagtcagcacagctggaccaagcacctacctaggaactaaaggtcatagaaccactccaggagctggtcaagagcaaacgacactaactctatcctgaacccttgtcagccttcaatcatttctctcctgttggggaaacatctgggatacagctgcccccactcctatgatcacaatacagccctgccacctgaggaggggcccccagctcaacggcaggggtgcagacaggggcctggctcagctttggccctagcctgaaacccctcagcttgcccataccctggtggggcagatctgacctcatcaactgttgtctagcagtggggccaatcccagtcaccttctctgaagaatgacccctcctgggcagctttgtctgacttgactctaggttctcaacagtagatgacactcaggaaggagacaacgtatgcttagggaacgtatggtttatcagttgagaagacacacgagcttccacaaattgatatatttacttcattgccagcggagtacactcgcatacatagatatctctgagtcactttaagtcacataactgcaaggatacaaacaaacactagttcatccctgtggctgagtgcccttggggaatactcagatcccagtggggcttctctctgcatcttctggccactctggccgttctccctgagcccacccaccttctccccctcccttccattcttccacgatggtagcaaagcagggaagtgccagtggaaagagactgcaggtgcacagaggcttggacaggccagagtccatggcagctgctttggcgtctctccttggttcatgtggtgggcacttcaccacttcaaggacactgtcaactccctgaaggcaaggcccagggctttgacttccctaggcatggagagacagtagtcaggaaaagcagctccttggcagactgctgggtgtgtgacaactgtgagggctcaggggctacaagcagggacagggcaagctcgcaaacaaaaaactgagacccgatgcggtgcatgcggggagcagagctgtgcagggcgctgcaggagcagaggagggggcggggcaggacggcttccttgaagggagcccttcaggcactgtcatgtgccacatcctgtgtgaggcacttcaccttcatcttattgcatctgggattcaaatccagatctgtctggttctaaaacccacgtgctttcttctgtacaggttgctacctgaggggacatctgctctgggactcagagaatgataaagagatctccagaataaatgaatcactttcagagaaaagtaaaagaacaaaaacacaaaaataaaaaacacacaaaagaagcaaaaaaatactacattctccccaaatttcacatcgtaagtggctggaagtgcaaacataaaggatgctagcaacatggccgcggcaagaggagcctctggagcaaggtcagcttctcccctgatttctggctttcagccaacaaggccaatggctcttccaaaccagctgctgctgctgagctccagaagaggggcctctcaacttccagaggccaggaaggctcaccctcggagctctcagttttgttttttatactgcaagacagagagattcgaagtggaggagggaagccaacaggggcaggaggactctggagaaatctcaggcctccatcatctggacctcacctgcctcctgcaggggcttcttggaggtggtgaaacccaagcaggaggcactgggcagccaaatctctagttcatgcctggactccctttcttctttagtgaaaaaggaagctgacagggctggggagggaggatagtgataactcactctggagagtgagttagaaggacagggaggtatggtcacactccaactctctaggtccttctaataccagcatctaagggccaagacgccagtctacattcctgactcactcccttcctccaccaaaacatactgaatgtttcctccataattctgccccagtgtgaataccccccagagacagggagtcccccgccaggacagcttccctctctgcggcatcacagtgccaccgccggctctggcactatagctttccctccttcttcctgctgccccctctcagctcgatcagcactgttgggcagaaatttgcctttaaggatgaagagtgagagcccctccccacttgcagaatataaatgcaaccagaagggatttgtcttcacctttcagcttctggaggagggaagcagctggctggtggcctcctccacagggaccattctcaactgtggggcaggagtggcctctagtggtcatggggatcacagccatcatcaccccagctcgcaggcagagcccaggggccaagcacctactttgttcatgatccagtcagcatcttcaatggctcttttaataatctgctggattctctcagggttgtcttcatctgaatgaacccgaaaactctgcaagtttaagcataaagaaagatgactaggcaaaattcccaggacaggcagcttcagagcaccaatcacaggccagggacactgctgggcactttatacccagcagctctcttcatcctccatagactgttatgattatcccacacagagatgaggaaacagaggctcacttgctgctgaacaatagcatttgaatcctagtctatgtgactgcaaagcatgtactcctgccaccaaggtaggtgcaaaaagactggcccccaagttactgccaaatcaagctaggcccaaaggctatcaggcagtagagtccaaggggaaacttccatctctcttcctcagaagacgctgctttccccagggtgagatctctgcataggctttacagcagggaggaagaagtaggacttctctcggcccagtgctaggagagctacacagggaagggaggggaggtagtagatagagtggcctcaggaaatccacccaggcccagtgcagagcatgggatactgtttgcttttgaccagatattcatccttgagaagcaacctaagattcaggttttgcttttcaaaaagaactggcaccaggcatggtggctcatgcctgtaatcacagcactttgggaggccgaggcgggcagatcacctcaggtcgggagctggagaccagcctgaccaacatgataaaccccatctctactaaaaatacaaagttagtcgggcgtggtggcacatgcctgtaatcccagctactcgggaggctaagggaggagaatcgcttgaacccaggaggcagaggttgtggtgagctgagattaagccattgcactccagcctgggcaacaagagtgaaactccatctcaaaaaaaaaaaaaaaaaaaaaaaaaaaagaactggcacctccctcccctgtcactcccagccccacacatcctcctgctcatctttaggagcgccccccgctcagcatccacctctggcatgccctccttgactcccccagacagctaactgctcgttctccatgtttccacagccctctgtggctaccgccacctctgatttttttttttttttactttccatattatatgtgtatgaattttagctaactttctatttggaaatgatttctcacttacagaaagttgtgataataatacaaagaatttcctaccagaatcactgactgttaacattttgctacactcgctttatcattctctttatataagtatgtataaattttttcagaagcatttaagagtaagttgcagacacgctatccttacccctaaacattcccatgtgtagttcctaatgacaagggcattctctgacataaccacagtaatcaaattcagaagactcaacattgatacaactctataatccatagcccatattccaatttcatgcactgccccagtaatattcattttttttttttgaggcagggtctcactctgtcacccaggtgagaatgcagtggcacaatcacagctcattgcagcctcgacctccgggctcaagcaatcctcccacctcattgtttgatttttctgtagagacaaggtctttctatgttgcccaggttggtcttgaactcctgagctcaatctgcctgccttagcttcccaaaatgctgggattacagacatgagccaccatgcctggttcccaataatattctttacagcattttttttctggtctaggatcatacattacatttagtcaccatatctcttgagttctctaatccagaacatcaaaaatgtcagcgttgtgtttcacgacactgacatttttgatgagtacaggcctattagttatgtggtagatggcctctcgatttggttttacctgatgttttctcaggattaaattcaagttgtgcactgttggcagggatgcctgcctaaatgatgtcgtgtcccacagtctattttaattacccacttagctgcctcatgcatgccctagcacagctggtgtgctgggtgaggcaccctctgtttcctggacagagaggagctgggctgcccagcactggtttcctgtggctcttcccacactgccacctcaccaccatctcagagactagctctgtgccctggccttggcctctgacctgcgcccctaagcctgccattagaggcagcccccagacctggtagagccagctcgcacctgcctgacagcatgcttgtaatgctgctggatgcccttggtcggcagctgctggcaacagcgcagcaagtatcggtagagctgcagtggcctccgaaccagttctgctcctggcagcggggccatccgtgagaccctctgtccctggaaaacaagcaggatcacttccagggcatcaagccaagttcagtactcagccctgacccccagttcccagtactctgggaagcaagcttggtgcagtgcagaggcccctcctgtcccatcccatggagcctgcaccttggggtggggtgggcattcagttcaacagaagctctagcccagagcaggcccacaagaccaaaggtgagtgtggagggagacttacagcctcatccctggcgtcttctttctggaactcaacttcaagtggtgcatgagtaggtgtccctcaccggcagggtagggtagaaaagcaggaagaccctgaggggcaatcactaggaaaccagctctgacatcagccatggtctggcgagggcaccaagccacagaggggagaatgcctacaggcctgagccttgaaattcaaagtgtgctcctgaaccagcaaaacccacagcatcgggagctcatcacaaatgtagtcttgggccccaccccaaagacccaccagatcaaacctgcattttaacaaggatgccaggagatttgcaggcacattttaaagtctgagaagcatgaatctagggggctctgcagagaagttgctggacagagtcaccacagcgtgggcacgtgatttcatttcactatgagttatcataaaaatcacaatgggctgggcgtagtggctcacgcctttaagtagggcagatcacttaaggtcaggagtttgagaccagcatggccaacacggtgaaaccccgtctctactaaaaatacaaaaattagccaggcttagtggtgcatgcctgtaatcccagctacttgggaggctgaggcaggaggatcacttaaaccccagaagtggaaatggcagtgagccaagatagtacgactgcactccagcctgggtgacaaagcaagactccaactcaaaaaaaaaaaaaaagagagagaatcacaatgagcacttgtttgtctctattcactttacatgtgattaatgcacacataagaaaaccggtcacagagaggtctgataacttgcccaagatcacacagctaataaagctggagcttggatttgaactctggcagtctggctccagagcctttttctaaaaaaaaaaaaaaaaaaaaaaaaaaaaaaaaaaaggctgtattgaggtatagttgatatataatgaacttcatatacttaaagtatataatttgataagtgctgccacaggtacacaccggagaagccaccgtcataatcaagagagttaacatatctatcatcaccaaaatttaccgcataccctttgtaatccctccctcccgccctcccgacgtccccatccccaggcaaccgctgcattttccagagttttgtataaatggaattatacagcaagctctcttttgtgtctacagaacccacattcttctctgtattaacactctctctaaagaacccacaactctagcttaacctcttcttttttaaaggaactatgagagtatagattgttttaaatggtaggttctagaacatatgggcttgcaaagctttcatcaggctcctgcctgaacctctgccacagcatctgcctggtgtcccagtacctagcctgtcactccagtctcctccacactgacaccacgtgagctctggaatcagtgtcctgggtgcatcccagtcagccacaggaactgctcccagacccctcaaaccaccaaatgtggcgcctttcagtgcacatgcagctccctggccgtggactccttcccatcttctccgtgtgaggaaccttgttcatccttccaggctcagcttagtgtccttcctccaggaagcccttcctcacggtccctctctggagacagaggtgctcaccctgtcctctgtggggctgcagtgccccgctcatggtgctgccagggactcatctgctacctcgcctgtggctctccctgggctgagcgcctggcccgcagtgggcttcactcactgttaactaaacagaatgaagctactatctcctctgtacagagatgccccttatgttccagatgaaggagctaaaagagatctagtgactggccttagttttaaaggaacatataagaaaaaaaaaaaaaccctcccctcaccttgcaaaaagaaccagaaactaaatctatcagatgcccttaaactaagaagggaagcttaggaagtagctggttccagaggctccttcattccatttacatcccattatctcctcggcaacaataaatgtgtctcctcagctacgttagccaattcctcctggttccctggattcttgctctgatgctggagtggataggtggttgtctgacccccaccatctattctcccttctagtaacagccccaatgtgtgatctggggtgcacccctccccaggtcttggcccagaaggtctgagtgggactatcagagccctgcatccacatggatataaggactagctcacacacgggcacgtgccaaaagctagtccaaccagagtgcatcgcaacacctctgcagaagtggcgtgaaaggactctagctccttcccactaaacttgatgctgggaggatttgatcctctctcagtgaagccaccttgcctcctctagaagcctgagaccatagccacatagcagaaggcagagctgagaccctgagaaaaaaacaagcccaaataacgtatttgggccaggggtgatggctcacgcctgtaatcccagcactttggcaggctgcgatgggtggattgcttgaagccaggagtttgagaccaacctgagcaacacagggagaccctgtctctacaaaaaataaaaaattaactgggcatggtggcatgcgcctgtagtcccagctactcaagaggctgtgatgggaggatcacttcagcctcgactgcagtgagctgtgatcacaccacggcactcagcccggatgacacaaagtgaaactctgtctcaaaaaaaaaaaaaaaaaaaaaaaaaagaattcatttgggccctaaaaccatctacctgaaggaagtccttcccctagacttctcaatgatctgggccaattaatcccctttcaccaaagcagctggggtttgttttgtcacttgtatctcaaagggtactaactgatggacagatcctcacaaattcttccacaatgcaatctgatgactccagctgtaaggcagagtcggacaggacagggcttctcaagttcctcctgctatcaatcatgaccatgccagtccgactcaccacccagaaatcagaggggaacccgttcaagggtggccaagaccatcaggagcaaccacaggagacataccaccaaagtcccaaacctgatgggtagactccactggcaggcttccccaaactatataaagtagtaatcaaatattgtaaaatgctagtcgcggaacagatggttaccatctgcagtcctcaaaattaacatttggaaagagcacaactttgtttcattacttaaaaactcaagcaatacttagtaaccaacccagcaagtatgggcggcagattattttcagctcaattataatacttagtcattctcagtaataactagtagagaatacatgtgtgggtccacttagaagagctaaactaaaaatgttttaatttaatttaaagcgtaggtttgctattatttaaggggcaatgaacctcacagcatcattgctaaaactgcagtcaatgcctctgggcctggcaacacttgcctcccttgccctgccctttggacttgatcttggcctctgcatcctggctccctgcctctgtgatggctcctccatcttcccaggcaaccaaaccaaaatcatcacagtcaacccaggttcctccttctcctcaatccccatgccactggtttctttcttttcttttctttttttatttttttttttttgagacagagtttcgctcttgttgcccaggctggagtgcaatggcgcaatctcgaccgcaacctccgcctcctgggtttaagcaattctcctgcctcagcctcctgagtagctgggattacaggtgcatgccaccacacccagctaattttcgtatttttagtagagatggggtttctccctgttggtcaggctggtctcaaactcccgacctcaggtgatccacccaccttggcctcccaaagtgctaggattacaggcgtgagccaccacacccggccccatgccactggtttctaattcctatcaaattccacctctgaatgcccctcatatttttcccttcctctctactccactgcatacccttggttcagactctctctgagacaactgcaacagcccctagctggtctccctgtcttccagtccattttctgccatccttctctgcccaacagccagagtgaatctttctaaaacataaatctcaaagtgtcctgtccttcctaaaacccctaatatccacccctgcccccatcattcatggcaacttttcccaaaatgtagaacaaatacctgaaattactttaagtagtatacagccagtattttttattgtaatgattttatatttattttcatgtgtaatgaggggggaaaaacacgttttcataggtattaatggcctaaagcagttttttcaaatgctcataaaactgattttttatgtatcaaattgaaatgtggacccggcaaaaatcatgagggtcctgaagtgtggaaagcactggtctacagaataaaatccaggctcctgtccatggcctgcaaggcccctctcgatctggcccctacctacccctcatctgcacctctcaccacccacagcctagtccaggcaaactgagccctgtatggcacactccacaacagcccatgctgtgtttgcctgttatggtctcagcactggggcagaatgtctggcatggagtagatgtacttactcattggggttctccagagaaacagaacctataggagggagggtgtgtgtgtgtgtgtgtgtgtgtgtgtgtgtgtgtgtgtgtgtgtcagagagagacagaggtttattaccatgaactggctcatgcaattatggagattggcaagtccaaaatctgcagagccaatgtcccagttcaagcacaaaggctggaagctgctgtagaaccaggaagagctgatgtcccagtttgaaagccacaggcaagagaattctcttactcaggggaggcttagacttttcgtttaaggccttcaatggattggaaaaggctcacccatattatagagggctgtgtgctttactccatcgaacaatttaaatgttaatctcacccgcattgaaacacccagaataatgtttgaccaaatacctgggcctcctgtggcccagccaagttgacacataaaattaactatcctggtagacattcaatttctattttgaacgaatcctcctacttctgcctacagtgctcctctctgcttcctgaatacctcctgcctcttccacactcagctctgtggtctggcatctcctcctcagtgccaccatgctcagtgggaggcctgtggttaccttgaaacagccttcatcacccctcattactctaggtcaggcctctagttcaggctcttgctggggttgctggaagggtatccacctgccctcaggccccaccagccattctccatatggtggtcacagtgatttaccaacttcctgaatgaaaatcttcactggatgtgaaacgatagtgtgaattatgaattttcttgggttataagaccgatgtggttatgtgggagaatcactttactctcaggagacgcaggcagaaggatttagaggtgacatgtcatcaggtctgcagcctcctttcaaatagttcagcaaaagacagcacagagagaagagtgaggaagatgaagaaatgcagcagaatgttcagatcacgtttagatggtaggcattaagggtgaacaccatgctgttattttaacttccatatatttggaaaattttcctaataaaaaatcgctttaaaaacacacctggcaggaagtcacccagcttttctccctacatgtgctccaagtggcaggaaactcacaagtcccccattttcgctctgctcaagctattggaaagtccctccagttctgagttaaaattccccgctgtaaagttctactcactccacaaagagctctactctttgggacaaaatcttccctcacctcctcccaagcccagcttttcattattcacagtcaactatcccagcccctccctagtcccttttccaatgtaagcagcggggaggtgctgtcgcctctcaaagtgtctctgtcccacttgccctcctctcaacacacgtacctttatttttgataccactcttaaacctgctgtcccatgggaaaacaacagtttggccatgctctgaccaactccacaggcagtggccctgtcacctcctttgacctgggaattcaaggaatgcagctcagactgcttctctgctggggccctcacgtggccctggcatttggctcaaaggcatttttccatgtgctgctctttttttcttttttctttttttttttttgagacggcatttcgctctcgttccccaggctgtagtgcaatggcgcaatcttggctcactgcaacctctgcctcccgggttcaagcaattctcctgcctcagcctccccagtagctgggattacatgtccatgccacgatgcccggctaatttttctatttttagtagagacggagtttcgccatgtcggccagtctcaaactcctgacctcaggtgatccacctgccttggcctcccaaagtgctgtgattataggtgtgagccactgcacccggctccatgagctgttcttaagtctctttccccatcttttattttatgaggtcattccagagtcacaatctgccaccatccttaggggggtctgttatatcaactcaattcaacaaaataagagcacagaaacagtcacaccccaggtaaacacagggtaaagacaaagagaaagacagtaaccctatatactgtaagcatcagtcaactacgccatgccattcagagcatctagcacctgtacaactctggacccagccctaggaccacagagatgaacagtctggtgtacctagctctctgacccagagccttctgcaaagccgatggctcccatccagggaatgagtaggacatgccaagtttgagagcttttcatgttacctcatttaatcctcacaacaatattttaagggaggtatcattagtcccattttatagatgaggaaactgaggccctgagaggttaagtaatttgccaagagcaacaaggctagtatagagcaaggcccggaatagaacctaggtctatttgattccaaagactatgcccttatctgcttcgtgaatctacctgctatgtctgagccactcataaaaatactgaccagatcagggctaaggaccccacaaagaactctggcagggttcatgcatgaccaggttcaagcacttataaaggcacttgactgcactattatccagtactcctcaatcttctctacaaaaccttgctccatgcctttctgaaacccaaggacatcgtctgcagcttccccctgcatatagatggaaaaaaaaaatcaaaagaaagaaagagtcaccaggctgacatcaattacacagataaaggaaaggagcaactaaagaaatgcttaacaacaaagctcttaccaaatccaaaggagaatatgacagaatttttaaaaagagaaaataaagctacaaagggaatttcctggaagccaagtgttatcactggcacagatgttgagaagcaggcccacagtcccatttaaccccactgtccttttccctaatctatgtcccgatataggcacctaaaaataagtgggaaaaagtcatatattaaaaaaagacgaaagaatggaactgcagaaaataaccagaaattatgccctattgagcactgatacacgctaaattaagcctgcacaggccattttttaaatatgcaattactcttcttgaagggaaaagttgaaaaataggaatggagtggttttgcttcccacccccacccactccagggctccatcttgcacatctgtgttctcccaagctagcaatggggcagcaatccctgcctcccccagtccctctcctacatagccaaggctctaaagtcccctcaccccctccctgcccccttcatccctgttggcattaccttggttcccagctttgtacccatacctggctgggactatccgaatacctcctgatctgtctccctccttccagcccaatccacatggtgccacccaagaacacttcctaaaaagcacaccctgtcactccccttcctcagaacctctgtagagagttctctacccatggccttctgagatctgtttcaatccctctcatcagtctcccctcctgctgtccttcccacacttcctgcattttagccacagactgaacttggaggactctgggatcagacagtctgggttcaaatcctggttctatcacctgctagttctaggaccctggacgagtttcttaacttctatctcgaagtctgttccccatctgtcaatgcggtccctaataaatagtatttcctacataggactgttgtaaggatgaaataacgctcctagactactaagcatgatgcctggcacacactacatgtttcctactaactgttattgttaataccatctctgaaacatgctgtgctttcccctaccttgacttcttcacctgcctcaagaattccccttcatccttagagatccagttccctgtcacctccttcaggctttcatcccatgctgttcacacccctattacagtcatcacactgctctgtaatcacttattgtgattataatcgatgtgacagaacttagagcaggttttggagacaaagaaccctagtttaaaagcctacctctgctatctactagctgtgtaatcctggccaacctggttgacttctctggacttctgcttcccccactgtaaactggagaaaagaataacccacctcacaggggttttgtaaagaccaacctagctaacttatggaaagtgcctagcacaggggctggcacatcttaagtgcttgaacatctttttttttttttttttgtcctgagacagggtctcactctgtcacccaggctggagtacagtagcatgatcagggatcactgcagtcacaactgcccgggctcaaacgattctacctcagcctctcaagtggccgggatcacaggcacacgccaccacgtctggctaatttttttaattatttatagaaacgaagtcttactatgttgcccaggctggtctcaaaattctaggctcaagtgatcctctttcctcagcctcctacggtgctgagattatgggcatgagccactgcgcccagcgttgaacatcttaccctttcctactttatttggctttctgttccttgctgactgtaagcttctgaagaacaagaaactatactgtattagttcaacacctgtgaaatgaagggaaattagtaagaaaaatatatatacggttattagtcactcctccacagtttatagtacctgaaccataacagaagttccatagatgtcaattgattcccaagttaccagaggaaactaaagccagcaggaaactgtcctgaagtcaagaacctatggcaggtgaacccagaaaacattacgctaagtgaacaaacccagtcacaaggggctacttaatgtatgattccatttatacgaaacatccagaataggcaaaagtacagagacagaagtacattggtggttgcctagggctgggagaatgggagtagatgggaggggggagtgacagctaaaggaggtgtttcttttggggggtaatgttctaaaacattatggtgacagctgcacaactctgcaaacacactaaaagacactgaattgtgcactttagatgggtgaactgtatgcttcgtgaattatatctcaataaaactttttaaaacaataaccacaaaaaggatcaatcctaggagcgaaagggttttggccacggagcaacttgctcttacgcagaagcataaatcatcacgacaaggttgctccggccaccgggtgccgcgggcagagggacggtggaggggacattctccttttaaaagtggccaggcccgtgagcctctgagaggctggcctccgggctgccccggacctcgcgcccctagctcgcgctgcaggcctttcctgctcctccgaggccgcccggccaggcctgcgtcaagcccgggcgccgcgctccggtgcactcagctctccggtggaagagcgcagaccgcaagggaaaaggtgccggcgcgggtcgcccctaggtcttcaatagatccgaggacacccgaggcctccacatccctagcccgcccccgccacccagtggctccggccgccgctgcccccgcgcccccgccctcggcctcggcctgcgcagcgcggctcaccagcctccaggggaacgccagccccggacgccgccgcggcgacgagtgcgcctgcgccccggggactgagcggcaccgcccctgcccggcgacggtgagcccagcgccctctgccggccgcgcgcgggactcggggtcctactgggtgcctcttcctagatccgaccccacccagttgaaagctgtccccactaacagccttcgttacctgttacctcaaacacccactctgccttctggctgttgctacgccggatataagccctaaaggcactctctcctccttattcctgaatatggattgtgctatgaatatggggtgttcaagatctctgaaaggcttgctggaggacttttcctgaacctctcgtgttgatgacaagaattgtgtttggataggaatctgcgttttgaatcatttcaccaaattacagtcccataacacctgtcaaaagaataaatatgacagtaataagcatgcttcctttcagacccatctataattataattgaggaaaataatacaaaatttaaacttagagctactgccagtatcattctttgaaaatgaaataatgctgtttattaaataggctctccctgctctctaatgtttaaagctcaagtgcttctctgaattgatttaaatacaagttttatatcctgaaagaaatcaagatgagtcattatcttaagacaaacccccctgttcaatgatgctgctgatctctcagctgatgtctaagcgggagttaggttgttagtggataatattgcttctgttcacgtctctcttctccagggctttttaaacctgtttgtaacgaaaaggctgatttccttcagactccatgtgtcgttgatttaacaggacaacttcttacaggtttttctttttcctttttctttttttttttttaagtaaaacattgctccccggtggcacctgggaatctgtttttcttctcttaggataagagaagcagggatatttcttaacggaagttttgttttgttcctaactccctttagagcttcctcttttctttttttttctcttcacctaacatactagacttccctcaaatcgggggtgggggatgggaaggtggggttccctcccttgaaatattcagataattgcttccatttattttaaagatgtagacttggacaaatatatctgaaagatacaattgtaccctcataaatcagccctcttatttacacatgcataatcaagggcacgtcattaatgcagagccaatcaataaatcattaagcttttaaagcccttattaagaacaatctgcagtaacatcatccactcctgtgctcagtcttaggatcatttaataattttaagaaatttcacagtctgttctgtagtctcatctcccttttgttcctagatagctgtattcctgcatcagaaacatggttctaatacctagatctcataaaatattgaagatgcaagctgtttgctttacctctgaaaggctccaccttcagaatcacttgtgcctcttccaattttacaaacgcacaagattttaactttcacaacaatttcttataaacatccaaatactaagaaaaaaaaatccaaagtaggagagatttgaacaataatctctaattttttttccaagtcacaatggaaacctagatttgaaaataattgaatttgaacctttcaacttgacagcaaccttaggttcttacagcttcaatagtaaaatgaaataatttttactagtccaaacattcacttaaaatgacaccagtctcataatctgataaaaccccaaccatttttaccatgtcattttcctatacactgaaattttagcagatgaacccccttatgtcagacagtgcatgatatttacagataaacaaaatagaaagaccttttacttgagaaattagtcacccactgtccaggggacatgttcgcacaggggagtttattgactttcctaagaaatacaccacattctcttgatttctgacattatgtcatttagcctgacaactgcagatttgtaaccagtatttgtagggaaagatacaagaagtcctgacgtttccagtttaaacctgtttttagatttcaaagagaaatgataacgtttgcatcctctgattaaatcaggttattgtctccaagggtgaccatgtaaataattcaaattaattcatcagtgtacaataggtttaataagcataataaacacttttaagaaaatacttaagaccctcggtctgccctcgatcttgctccctattatctcagatttccctgagaacagaatgagtggtaccacgttgttctcttctattcaaaatatgcaaagctgctatttaccagcttgcaatttgcatgtctcaaatcctgccagaacacagggtgagggccatggggtgatgggtgaatatgccagaagaggacaccaggggcgaaaatggaaaatggggtgaacagattttccttaccccagcgtattgcaaaacacaactcttgctgactactcaagatttaagacaataaaaatattgggtatgaaaggttatgtgaaatctcagacatctagtttgtttttctttaattgctgggcaaaagaaagggatgagcaaggatttcaatatttttataaaagggaacacaagaggaaaaagggtacaattgtgactatttacaacatacacttggagattaatttatgggctgggtttcagccttcctggtcctccatactatgttactttctgcagcaccataaatccaactttgctgactggtatatgtcattctctgtttctagtgtgttctgtagtaatttattaacagtgaccacatgtgaaaccacattggtgatcagatgtatgttatctctgaatatgtccccactttttttatctcttgaaaatatgttctatgtctcatgatttcaaattgtaaataacatacacacatacacataatgttttgtatgaatcacctttggaatggaatttctttttcataaaaatttcaagtgcatgctggatgtgtatgtggcaatattaccaaaggagtgaatgcgcttgggaacattcttcttttttgcattttgacagcatttgactaaagatccacttaaaattaccttgctcacaaagtgtaattctgtttccactgactatatctgcagtgtcttgagatgtccagagacaagaattacatgccaccattaataggaatggagacggtaagaaataatcaactttattaaataggattatttgaagaaagaggagagacaaaggggtgaagaggagaaggagagaaagaagaaagtgaaaaggagggaagtggagaataagtaaaagtagaagggagttatcctgttgatgctgtccccaagagaaagggatgatagagttttaagtgtagcagcccagaaaaaaaaaaaaaggcaacgttaatgaagggaaatcatttatcggcttggccaggaaattgggtgttctggtcagtcaactacatggttaatagttaccttccacttcagcaaacatctgttgagactccttcatgtgcaaaactccatgcaagaccctgggtcatagcggaggcctctgaactctatccctgccatgcgggctctcctgtccttctccactatggttagagacaggtatagtcttgtcgctgtcctgctgtagtccccttaatgacttctccgtgttctctgaatacatacgccaaactccttaccatgtcctatgaggccctccagggtctggcctcttaagcttccatccatgtccccgtcctctgtagcagccacagtggcctttcagacactcattgtatcgtgtccttctgccctgctcctcctttagatcccagctaatagatctcttcctcgccttccctgacatccacattcccaccccataatggagcaggtccccccacccaaagagtagactgtacttttctccatggcatgcatcacaatttatagttacatataccccaatttggactccccccagagaggcccccaaagcaaggatttgagaacaactagttcatttgaaaggtggttctagaaaacactaagtgagaaaatagggaagtgaggctgggtacagtggctcacacctgtaatcccagcactttgggaggccaaagtgggtggatctcctgagatcaggagttcaagaccagcctggtcaacatgatgagagccccatctctcctaaaaatacaaaaattaactagccaggcatggtggtgatagcttgtaatcccagctactcaggaggctgagtcaggagaatcgtttgaacccaggaggcggaggttgtagtgagtgcgcccttacactccagcctgagcgacaagagtgaaactccatcataaaaaaaaaaaagaaagaaaagaaaagaaagaaaggaaggaaggaagcggggaagtgaggcaaggaaaagaaggcagcctgtgaagagagccttcccaagcaagttaccaccagggaccactgagcttcgtcctgctggggaaacagtgtggaacccacaccttggttatcccaccctggggtatttatacaccaattcctgtttgttacaggtcacacagtgctctcgggggcactaactccctggtacttctagcctgccatgatctcaggcaaagagatacagatgctggcagttggaaatcagccgggtatactgcagtggtaaggcgaaagggtggggcactgacagttgtggtagttacatatacatggacatttacacataatacatacatatatatgtgtgggtacatgtagatagatatgcatttgtgttattatatcagtcatatctctctctgcactagagccccatgagtgagagctgggactgagtagcagtatcccacccagtgcctaggcctcacttcctgtggtccaccattaaaatcactctcttaccaacaccctcaactccctggttcctcttggcctctgtcacactcactctggatgaatctaccatcctccttctccaacctgcacccaagcagattaatgctgagaaaattacacaacagagctgatgggttttactttaaatttatgatccaatcctcaaaggcataatggatgttgcctgggaagaaaataactctgtttctcagaactcctacaccccacctccaccctcagtctcagcagaggacctcactgaaagatagacatcatcagatcttcttctcactccttccccttctttcctgatatgctgtggaaagtttccttctgcctttgaaaaaccggtccttggctgggcgcggtggctcatgcctgtaatcccaggactttgggaggccaaggcaggcagataacctcaggtcaggagtttgagacctgcctgaccaacatggagaaaccccatctctactaaaaatacaaaattagccgagcatggtggcgcatgcctttaatcccagctactgggcaggctgaggcaggagaatcgcttgaacccaggaggcggaggttgcagtgggtggaggttgaggtgggcagagggtgcggtgagctgagatcacgccattgcactccagcctgggcaacaagaacaaaactccatctcaaaaaaaaaagaaaaagaaaaaaaaacggtccttctgctggttccctggattcaatccctgtgtgttcctcaaatctttgctcctagagttatcccctctctcctgcttcattaatcaccccctttccacctgttcattctaagcaacataccaatgtgatcgagggacttgctactcaaaatgggattcatggatcagcagcctgggcctcacctgggagcttgttagaaatgcagaatctcccacctgggcctgcagaatcaaaatctgcatttagcaagatcccaagatggttcccaggcacatcaaagtcagacaagcaatgggctaggggttcccattaaaacaaattaacagaaagcacacatatccacatcccacacccatatgagattgctccatatcccctaccagatagatttctatttctctactctcccttatagccaagattttatcctttcattcaaaaaacgaacacctaccaggtaccaagcagttttctaggttctggggagacagaataaataaaacccatttgatcagtgtgcatgtgtggtgtcttaggagcagagaaaacaaagaaagaaagaagacatgatcaggtcataagtgagtgctttgcagagaaataaaatgtggtcatgtggtcttcaccagatggctactgtagatcactccaaagaggtgacatttaaactgagatctaagtgacaagaagccgtcattagagttgtctacaagggaagccttaatttctcacttaccattcccccatttacccgtcagccaatacagttggtttccatctcgtgccactgaaactgcttaacaaggttttcaatgacttccatgttgtcacaagtaatagctcattttctgtcccttaaaatgttgtaaagtgagttagtcacctgattaacctcttccttgccatacattgttcaatgttaaaattaaaggcttttctggctgggcaaggtggttcatgactgtaatcccggcacattgcggggctgagacagaaggatcacttcagcccaggagttcaagaccagcctgggcaaccaagtgggactcttgtctctacaaaaaattaaaatatttagctgggcgtggtggcatatgtctgtggtcccagttactcagcagtctgaggtgggaggatcactcgaacctaggaagtcaaggctgcagtgagctgtgattgcaccactgcactccaacctgggtgacagaggaagaccctgcctcaatttaaaacaaaaaaagaaaaagagactgggcacagtagctcactcctgtaatcctagcaccttgagaggccaaggctggcagatcacgagatcaggagttcgagaccagcctggccaacatggtgaaaccccgtctctactaaaaatacaaaaattagctgggcttggtggtgcacacctgcaatcccagctactcaggaggctgaggcaggcgaatcacttgaacccaggaagcggaggttgcagtgagccaagatcgcaccattgcactccagcctgggtgacagagcaagactctgtctcaaggaaaaaaaaaagaaagaaaaaaaaagacttttctggataagggaagaggtggcaggaaagatgaaagggaaggagataaattagataaattttactcaagcataaatatatcatttcaaattcagtaaaaaatacattttatttgattttttttttatactttaagttttagggtacatgtgcacattgtgcaggttagttacatatgtatacatgtgccatgctggtgcgctgcacccactaactcgtcatctagcattaggtatatctcccattgctatccctcccccctccccctaacccacaacagtccccagagtgtgatattccccttcctgtgtccatgtgatctcattgttcaattcccacctatgagtgagtatatgcggtgtctggttttttgttcttgcgatagtttactgagaatgatgatttccaatttcacccatgtccctacaaaggacatgaactcatcattttttatggctgcatagcattccatggtgtatatgtgccacattttcttaatccagtctatcattgttggacatttgggttggttccaagtctttgctgtcgtgaataatgccgcaataaacatacgtgtgcatgtgtctttatagcagcatgatttatagtcctttgggtatatacccagtaatggtatggctgggtcaaatggtatttccagttctagatccctgaggaatcgccacactgacttccacaatggttgaactagcttacagtcccaccaacagtgtaaaagtgttcctatttctccacatcctctccagcacctgttgtttcctgactttttaatgattgccattctaactggtgtgagatggtatctcattgtggttttgatttgcatttctctgatggccagtgatgatgagcattttttcatgtgttttttggctgcataaatgtcttcttttgagaagtgtctgttcatgtcctttgcccactttttgatggggttgtttgtttttttcttgtaaatttgtttgagttcattgtagattctggatattagccctttgtcggatgagtaggttgggaaaattttctcccattctgtaggttgcctgttcactctgatggtagtttcttttgctgtgcagaagctctttagtttaattagatcccatttgtcaattttgtcttttgttgccattgcttttggtgttttagacatgaagtccttgcccatgcctatgtcctgaatggtaatgcctaggttttcttctagggtttttatggttttagggaatcaatatcgtgaaaatggccatactgcccaaggtaatttacagattcaatgccatccccatcaagctaccaatgcctttcttcacagaattggaaaaaactactttaaagttcatatggaaccaaaaaagagcccacatcaccgagtcaatcctaagccaaaataacaaagctggaggcatcacactacctgacttcaaactatactacaaggctacagtaaccaaaacagcatggtactggtaccaaaacagagatatagatcaatggaacagaacagagccctcagaaataacgccacatatctacaactatctgatctttgacaaacctgagaaaaacaagcaatggggaaaggattccctatttaataaatggtgctgggaaaactggctagccatatgtagaaagctgaaactggatcccttccttacaccttatacaaaaatcaattcaagatggattatttgatgtttttaacaaaccctttgtgacatcaggtatatttggaaatgagatagataactgcttttaccagctcaccaagggaaaagctggttcaacatttcaactggaggtcaactggcctccccgacctctgtgttaactctcagggtatctgaattggaaagagagctggagggggctaagaggcttcccactggcccaccaggctgaacccactctcattctacctttttcccctgcaaagcaggttagagcagtgagggggtagagaaggtgaggaagaagaaaaccatttgctgggaactacagaaccttacccaggaaatggatgggagttattattagcctactgatgtagagaaagacctaattcagcccagggaaggtggtttagggatgccagtatgtattgtaccaaagcttgggtttcataaaatagagggctgcatacctcatttactacacatggtttgtcaaaactcttgacttacatatttcttttcttttctttttctttctttctttctttcttttttttttttttttttaattgagacggtcttgctctgttgcccaggctggagtgcagtgacacaatctgcaacctccgcctcctggtttcaagcgattctcctgcctcagcctcccgagtagctggaattacagatgtacaccaccacgcccagttaatttttgtatctttagtagagatgggtttcaccttgttgtccgggctattctcaaactcctgatctcaattgatctccccttctcggcctcccaaagtgctgggattgcaggagtgagtcaatgcatccagccaggtatttctttttaaatatcaaatagcgttagagtctgtcaggagcacgcagcttgaatgttaccctagtgctgcgcactgaagcttggtcctggtaacaaccactgatgtacgcatgcaccatcatagtcactcaacacactgactttgcagctttaaccactgaatccaagctcagtcaacacttggccctctgtggtgatggggatatggccaagggtaaagaaaactcagaggttaagagatggttacagcttcatgcccctgcctactccaatagtagaagacagtaaaatcaaaagaacattttgtgacatgtgagaaatatataaaattcatatctcagtatccataagtaacgttttatcatagcaatgcccatttatttatgtattgtttataggtgcatttgtgctacaatggcagagctgagttactgtgacagaaacaatatggctcacacagcctaaaagatttactctctgggccaggcacagtggctcatgcctataatcccagcactttggaaagccgaggtgggaggatcacttgaccccaggagttcaagaccagcctggtcaacatggtgaaaccctgtctctactaaaattacaaaaattcgctgggcaaggtggcgcacgcctgtaatcccagctacccaggaggctgaggtacgagaatcacttgaaaccaggaggcggaggctgcagtgagcagagatcccatcactgcactccagcctaggtaacagagggagactgcctcaaaaaaaaaaaaaaaaaaaaaaaaaaagatttactgtctgaccatttccaaaagaaatgtttgtggatccctggtctgcagccagaggtgcaggtgttttagtcttggattccagggtctgcatgatggtgaccgcatcttgacttacctttgcagccttacctgcggggctttcctgcttcacatccctcccacaatggccctggcaaacctcttcttgttcctcacttaaatctcttgctgtcccacctctgtgttttctccctgctgttctcctcttttggaaaccacacctaatactctcaatttgcttttatgccaatttccctcaaccttcaaacaggccttcccacatctctcaactataatttatttctccaccctttttttttggccataattctctctgtgctgtctcatgacatgccagttttctactttgcattatgattatttatgcacatgttttattccccctctagactataaactccttgaagaatgcatcggctcattacaaaattagcattctgagaacccttatttgcatcacacataagatctcttgtcttcagcaaaaaggagtatacttatgacacatataattggcacttatcacacaaatcaatgataatggggaacaagggcaagatggttaattaaaacctacagcaaattcctccaaaattcatttttgcctttcctactattttaccagtataatatgcactggtttataccaaattccttattttttactctccccccagactttatagatgtgtaactgccttggccatcatgcagttagtgggtgcaacaagaccacaagtgaataatccaccagctgaaatcatcaggtctccaggaatggaaagctttgggacattctttccagtaagagtaggagcctctgaactctgaactttccacccacagagctccataaggatttgtgtgtatgccatttggaacttagacatggaaaaataatcttttagtatggctctgatactgaaaataataggtgacgttcaagtaaaaattaaataaaacaaccaagttccctgcacatatgtctgattaggcaggccaaatattctatgggaaacattaattcaaccagaaatgataaggaaataaaataaatatgaagaacaactctgcttgccaaagcaacatatgcgtttgggatgagtctttgcacccatgactagtatacacaaatattgtgttaaacctttcctcctaatagcctcatttctcacatgctcttcagaggaaaaaatgtgatgctaatttaagatgacttatcctgctaagcacataaataaaaaatagttcaaaatccagcacatgatagaactcccctttcacatttaattaagtacttttaattggcaattcatttggcagactgtatatttcgggctggagagacgaagcagagcagaccccttagttagatacaaaagaggagatgtggggtgtgtacaactgctttatggtatgtgatgcagaaatgtgatgtcaggcatggaagaaagacgactatctgactatccttacatctgggaaggaattagcagcgaacagggcaaatgctagagggtctaatcaggattataaaatgtcatttagaaagatatttacattgttaattaggcaatgaagctgataactgctactctgtacatcgtgctaattaccctggtgccttggaagactttctaatcagccagatcaatagactcctggtttatgctaatcacacagagtcaccctccttctgaagtgctttgcttatagcagcctgaacccagttcagctcctgcccactgtcctgtgctagaggcagccagcattcatctgtctgcccacatcacagcagtaaggctgatgcctgctcacccccaaggcccacagcaagggaactagaatcctaccatgcagcacgccgtcatcaattgttcaggaaggaggcctgagcctttgtgctccatgagattttcatgtagccacagctctgttttcttccgacaatgagaaagatcatatagtcccgagggataagggctatgaggaagatctagatttaagtctcctctgccatcgactttgacggtaacgaccttggagcaggacaccaattgttttgatgggaatgtgtgcaggaccaggtatgaaggtcaatttggctcagatactgggtgaacctttagggacttttgtttgtttgctttttcactgatcattagtatgaacaaactattcttctgagccagaggaaccaaactgcttacctctcccagtacacaggcagcatctctggggccccagcatgacaagaagaaatctgaaaaatgtaataaaaggcaaagacagtctaatgcagagtgctttcatgtgtacagctgcctcttggtcatccacatggaatgggtagagtgtgcatgaaggagacccagaaataatccatttacctcattgcaacctataatttctatctccttcccccaccaaacctcaaacaaaaaaatggctggtagccaagtggcctggtttgaagaagattaactcatttgctttttgctctaattccctggtaggtgtcctaatgaacagtcaaaaatcccacttggagagtaacagggcaaaaaaagaaaggattagcaaagggtttggataacccatggactgaataatcagtccccaaataatttagagtcaactacacgtaaactttaagcagcagccaagggagggcatggagttggaaagccaaggtgagagagacgctgagcacaattagggttggaaacagctgggatccatttcttcactgcagaagcagaactccttctgtgcacctctgcatggggctcccaagctttcattgctagctcccctgccccagcaggcagagcctctgagttcaaggccagctcctgcgctgggctttgggatggggccaatttgttgaattgtttcagtgctttgatgtgtaaactaatcatccgtcattgtgctctaattaaacttaagtggtgcaatggatttgctgtcatagaggccagggcccctcctggcttggggagggaggggcaggatccactgaaagcatcccagccccaggagagcatagagcaaggaaatgccaggcatgaataggaaaggagctgataaccctgtctaggtctaggagactgaagaaaatgggaaaaaccagcaaccaaggcgggtctatgagtctctgatttccggggtgtaatcgccctcagcatgagtgtccagacataacaagttcaggtcaagtggctaaccactaggtgatcttacatttgtcatggtaacacatctctctggggccagctggcttggcatcatcaaattgtaaaactgtttcacaaggtgaggggcagtttcccccctacacccaaaccagatgaccaaaaggtgccaggagagcagattcaagactctataaaatgttgaccatcacggccattttcctcttccccaaatacttgcattctaactttcaagaagtatgtctgcaattatgaaggggagagtgagttctccttatgatggagagtcagaggaaagagggagaagatggttgtggtgcagttgtgctgtgacatgtgttttgggaagagagtcatcctgtcccagacctgacccttccctggctccagtgcatcaccagaaggcggggatgagagtgtccatgttccatactgcaccaacattttgtgggaccacaacctggataatgctgatacatttgtgttgttgcctcaatgtaattgataaatcccactccatagagacacagtgatgacatgatgaaaagattcttctcttcttcacccacgtattcgtttagcaactattgattgaatatctgtgtacaaggcatgctataagatccaagttgtgcaagatacagcctctgccatgaaaggactcctactgtcagaggaaagataagatgaccacctatgatttgacaattgcaagtaattcaataacaactataccttggagggaaaaaaaaatagatcaagcatattatcatatggatattatggggaactgtctagacatctccagaaaagaaagggaagaaaggacactaacacttttggccatctttttgtatgccagacactatgtcaggcataatcacaactgttttctcattcagtactcaccactgtcagaggcgtttgaacaagagcaactccatcttgaataggtgctgggtaaaataagcctgagacttactgggctgcattcccaggaggttaggcattctaagtcacaggatgagatagggggtcacaaagaccttgctgataaaacagcatgcggtaaagaaaccagtcaaatcccatcaaatccaagatggcgatgagagtgacctctggtggtcctcactgctcattaaatgctaattataatgcactagtatgctaaaagacactcccaccagtgccatgacagtttagaaatgccacggcaatgtcaggaaattaccctatatggtctaaaagggaaaggaagcctcagttctgggaattgcccacccctttccaggaaaactcagaaataatccaccccttgcttagcatataatcaagaaataactagctgcatgtggtggctcacacctgtaatcccagcattttggaaggccaaggcgggtgggttacttcaggtcaggagttcaagaccagcctgccaacatggcaaaacccagcctctactaaaaatacaaaaattagccaggcatggtgacatgtgactgtaatcccagctactcaggaggctgaggcaggagacttacttgaacccaggaggcggaggttgcagtgagctgagattgtgccactgcataccagcctggtcgacagagcgagattttgtctcaaaaaaaaagaaaaaaataaataactataagtatccttagtccagcagtctaagctgctgctctgcctatggagtagccattttttttttattccttcgctttcttgataaacttgctttcactttactctatggaatcgcctcaaattctttcttgcacaagatccaagaaccctctcctggggtctggatcgggacctctttccagtaacatcatcatcctataaggtgaacatgattattcctattttacaatgagaaagctaggccaggcgtagtggctcacgcctgtaatcccaatactttgggaggctgaggcgggtggatcacgaggtcaggagatcgagaccatcctggccaacatggtgaaacctcgactgtactaaaaacacaaaaattggcctggcgtggtggtgtgcgcctgtagtcccggctactcaggaggccgaggcaggagaattgcttgaacccgggaggtggaggttgcagtgagccgagatagcaccacttcactctagcctgggcgacagagggacactccatctcaaaaaacaaaacaaaacaaaacaaaacaatgaaaaagctaagactaaagtatccctgacgaatgccatataaaagtgtggcaggcatacaacttgtccctgccctctccacagccccatatctgcgctctccttctctggtaatagaaattttggccttagatagttacccaaataagatctacctctcctagtctcctttgtatagatctggccatgtgactaggtcctgagaataggatggaaagagatgtgatgggagcaacttccgtgttgtatcttacaaaagaaagcagctgggcgtggtggctcacacttgtaattgggaggcagaggcaggtggatcacttgagcccaggagtttgataccagcctgcacaacataatgagactttgtctccgcaaaaagtaaaaaaagaaattagcagggcatggtgatgcgcacctgtagtctagctactcgggaagctgaggtggaaggattacttgaatccaggacgtgtaggctgcagtgagccatgattgtgctactgcactccagcctgggtgatggggcaagaccctgtctgaatgaaagaaagaaagaaagaaacaaacaaacaaacaaacaaacagagagagtgggaggaagcgaagtcagaaagcctgttttctctttcctctttctgccttcctgccggttccaacaaagatgtggtggtgaccacctcaaaccatggaaatgtagacagcatgctagggctgacggagtgaatgactggtagggtccagattataggacaccctgaagaccccatatcagtttggactgtttctattcctactcttacatggaagcaataaactattttgtttaaatcactgatatattgactcagtgtttcaggcatatgtcaagtaatagagagtagcacaaaccaaataacagaggaatgcagaggagagaaaaaaatcatcaagaaaaatattcttcaattgtttttaaatttatcaaacacctaatacatgccaggcactgctctgggctctggggattcaaaaataaacaaagttcttgaccttaaggaggaaacccataaaacgatcattttatgtggaaataccattgttagcaataatcacagagtgccatgagtgaaccggaaatggacacctatctcagcctgaaggatttccagcctttaacctgggcctggaaatccccatttggattttattatagtagggaagatggaaggtggaaaaaagaggaggggaaaaactgttgtcagaggctgcctccttgcctgactttgattagtcccactacctgtaattgccacctggaaggttcactctctccattcctaattattcttgcatgcacaggtcccgccttgtctagaagactctgctgaaactccccaatgctgagtctgaaggagtatctccaatgacactgacatctgcagcactccagcagactaaacagcaatgcaaggccacacatcaagtatatttgcagggttgtcttccttccttattgtttttgtttgtttgtttgtttgtttttgagacagagtctcactctgtcaccaggctggagtgcagtggcacgatctcggctcaccgcaacctccacctcccgggttcaagcgattctcctgcctcagcctcctgactagctgggactacaggcgcacgccaccacacctggctaatttttgtatttttagtagagacggagtttcaccatgttggccaggatggtctccatctcttgaccttgtgatctgcctgcctcagcctcccaaagtgagccaccgcgcccagctccttctttatttagattaaactccttaaaggccggagtgatgttttatgaagttctgtgcaccttgctcagcacatggcacggagcctgcaattgagagcccagagccatgtggacaactttggactaagactcacaggggttcaactcccaccctttccattcatgggctgtgtgtgatcaggagcaagtcacttacccctctgagcctcactatcttcatctgtgaaaacaggaatcatagaacctatttggaagaattgtcataacatctgtaaaagtatctagcaatgtgcctggcacagaggtaatttattttcccttttttttgagacgaagtctcgctcttgtccgccaggttggagtgcgatggcgcgatctccgctcactgcaacctccgcctcctgggttcaagcgattctcttgcctcagcctcctgagtagctgggattacaggcaccggccaccacgcccggctaatttttgtatttttagtagagacgggggtttcaccatgttggccaggctggtctcgaactcttgacctcaggtgatccgcctgcctcggcctcctaaagtgctgagattataggcatgagccaccgcacctggcctattttccttttaaaaatacatatttctcaaaacatatccttaattctgggtgctgtatcatttattagaaactgcaatgctcacgccctctgcccattcacattgactgcatgcggaggagtttggaagactctaatagagagagcccacattcaactagtttaagtgtcatgatcattgctggtcaggtcaggtgcgtgttgagtgcatgagaggcagagggggtcgtgtgctggccatttctggacctcatttacaaagttggctattcattaagacttaagacttgccacattgggccaccaagcaaagattgctgtcaggaacccaaactgggaaaatagatcatttatgtcctgaatggctcataacattttttttttattatactttaagttttagggtacatgtgcacaatgtgcaggttagttacatatgtatacatgtgccatgctggtgcgctgcacccactaactcgtcatctagcattaggtgtatctcctaatgctatccctcccccctccccccaccccacaacagtccccagagtgtgatgttccccttcctgtgtccctgtgttctcattgttcaattcccacctatgagtgagaatatgcagtgtttggttttttgttcttgcgatagtttactgagaataatgatttccaatttcatccatgtccctacaaaggacatgaactcatcattttttatggctgcatagtattccatggtatatatgtgccacattttcttaatccagtctatcattgttggacatttgggttggttccaagtctttgctattgtgaataatgccgcaataaacattcgtgtgcatgtgtctttataacagcatgatttatagtcctttgggtatatacccagtaatgggatgtctgggtcaaatggtatttctagttctagatcaacatttttgtatagaaaggagataaggcacagtatttggaattgcctctccatgaatttttgatccctcctgtcctgccacacacacacacagacacacacacacacacacacacacacacacacacacacacacacagtcccttcccctaaaaaagcccgttcctgccctggtctagaaacccaggagccatccctgactctcccttccccttaacagtgagtcttgttgattctctcctcagcttctctcttgaatctatcctcttctctccatcccaccaccaacctagtccaagccaccactgtctgtcactaagagccttgctactcaaagagtagactgggaaccagcatcactggaagcttgttagaagtgcaatctctgaatccaccccagacctagatgtaaggaatcagaatctgcgttttaataagatccccagtgactcatttgcactttaaagttcaagaatgggaatgctgcaggagcctcctaaccagtttccccctcctactgctgcctcacattaactcattggtctggaaccaatttgctctctttttatttatttattttttgactgcaacctctgcctctcaggttcaagcaattctcctgcctcagcctcccaagtagttgggactgcaggtgcacgctaccatgcctggctaattttttgtgttttagtagagacggggtttcaccacgttgcccaggctggtctcgcactcctgagctcaggcaatccacccgcctcggtctcccaaagtgctaggagtacaggcatgagccactgtgcccagcctcaatttgccctcttaacttgagaactcccacactattcagatagtgccatttttccactgtacttctctacatgacacaggattgctgttctaattttttacagattattttatccacaagataaagacaagatttcttgtttcctccctgagtaggtgagggaagatattttgggtcatttcattggaggctgtgggattcttttcagggtcctgcatttatgaaacggtttcagttccaagtccccttttcaagtgagcccaagctttgtccctgtcccagcccaggcatgaaaactccagccccaagccattagggtttgtattctggaactccccccaccccactcccacctctcagcagccacagaatccacttgggatctttctgctctgtctttaacctctcctaatctctgcctcaggattatttgcctttctttatgtgaaactcagacccactgtttgatttagtttagtttagtgttgtttgtttgtttgtttgtttgtttctgaggtggagtttcattcttgttgcccaggctggattgcaatggcctgatctcggctcaccgcaacctccgcctcccgggttcaagcgatttgcctgcctcagcctccggagtagctgggattacaggcatgtgccagcacgcctggctaattttgtattttttaatagagatggggtttctccatgttggtcgggctggtctcaaactcccgacctcaggtgatccacctgcctcggcctcccaaagtgttgggattacaggcgtgagccaccgcacccggcctagtttagtttttaaaatgaaagtcatttctatgtgtttatggtggagttaggagaggaggagggaaaagagtcccctactggcccaacttacttatcctgttaccagtcagagccatcatcttaaaactgcggtcagatcccgctactgtcctgtttaaaatgggtcagtggcttttctccacgtttgggccaaaatccaaaacgcagagtaggcaacctggcccctgcctactcagctccccagtcattggtgcgaggaataaagttgttgaaagtgtgacagtctagagctgcactgtcccacagggggccactccagaccgagctgtgtgcttggtgcatactggatttcaaagacttcctatgacaaaaagaatgtaaagtacctctttaattaaaaaaaaattgtttttttgagacagagtctcactctttcgcccaggctggagtgcagtggtgccatccctggatggcctcaactatagcctcaacctcctaggctcaagcaatcctcttgccttagcctcctaagtacctgggaccacaggtgtgcaccattaagcccagctaatttttgtatttgttgtagagatgaggtctcactatgatgttcaaactggtcttgaactcctgagctcaagcaatctgcctgcctgggcctctcaaagtgctgagattacaggcatgagccacagcggctggcccaaataaatttttatgtagattacatgttgaaatggtaatatttggattattgtgttaaattaaatatatttcttattttatttatttatttttttgagatggagtctcactctgtcacccaggctggagagcaatggcacaatctcggcttactgcaacctccacatcctgggttccagcaattctcctgcctcagcctcctgagtagctgggactacaggcgtgtgccaccatgcctggctaatttttgtattttttagtagagatggggtttcaccatattgcccaggctggtcttgaactcctgacctcatgatccgcctgcctcagcctcccaaagtgctgggattacaggcgtgagccaccgcacctggctaaatatatttttttaaattagcaccggccgtggtggtgcacacctgtagtcccagctactcgggaggttagggcaggagaatcacttgggcccaggggttccagtccagcctgggcaacacagcaagactgtctcaaaaaaaaaggtttttaattaatttcaccttcttaaaaatatggttcctaggaatttaaaatgacaaaggcagtttacattatatttccatcagacattgccggtgaagcacctggaagcaaaagtgattgcagacattggaactcatatgtcatttctgttcgctctggtagactcgggtgcctcgggaaagcccagtgctttcagaagcaattcatttagcactgagcgacatctgagctcattcctgactgtgttgaggggtgggcaatctcactggggaaaaacaaacagcccgaatcaggctttgttcttaatgatattcctaagtgctgacgacacccctgctgggtccagcctcaggggacacagtggggaactgattgacagccattaagaaaatggaattgaacacctcagatcagacatcaaggcagaatctttatcaagctagcatcagactctgcgagctctccagctaggaggaaggcttgcctctaggacctttgctgtttgcgattatagacagtccccagtgctatttaacattctagaattcgaattgtaaaaagacatcattgtgtactgcttgccattcactggccatgtggatgagtgagttaaccaagttaacctccatggccctcagtgttctcatacatagcatggtggtgaaaattgtacctacgtcatggagttggtggaaaaacgagacgagcatccagccatgcacttataacagtgcccagcatacagccagtgttcaatggagattcgttattatgatggctatttatgtttcacatgggaatgtttgcataaaaggagtctttgcctacagccaaaaatcttaagctaaagctgagagatgtgctccatatggcctcacaagtcctaagtgccatttctgggtactggtcatgggcctgttctgaattattttgcaaaatgggatccaaaccaagaatctttactgtgatagtggtcatttatcattttggcatttgtcaagcatccatttcccttcaaaatagtatcccaggctgggcatgttggcttatgcctgtcatcccagcatttttggaagctgaggcaggaggattacttgagccatggagttcaagaccaaactgggcaacatagtgagatctcgtctctacaaaaaaaaaaaaaaaaaaaaaaaaaatggcttggtgtattagtctgttttcacactgctatgaagacatactacctgagactgggtaatttataaaggaaaagaggtttaattgactcacagtttcacatgactggggaggcctaaggaaacttacaatcatggtggagggggaagcaaaaaaatccttcctcacaaggtggcaggagaaagaagagtgaggaggaagggggaagagccccttataaaaccatcagatctcatgagaactcactcactgtcatgggggaaaccatccccataatccaatcactcccctccctccatatatagggatgtatagggatgacaggtccctccctcaacacgtgtggactgcaattagagaggagatttgggtggggacacagagccaaaccatatcacctgatgtggtggtgaacacctatggtcccaactgcactagaggctgaggcaggaggattgcttgagcccaggaaggcaagactgcagtgagtggggtttgtgctattacactccagcctgggcaacagagcaagaccctgtctcaaagaaaaaagaacagcatcccaatttccttttgggaaataaagcctccctcattttctgcagttggtaactcctagcacctctccctggataagcccagctcctctctccctgtcctagtatagacaggggcagcccacagagtgctttttgctgtgagctgccccacatcaacaatattcttctaatcttttcctttggttataagtcggtgagagtccatttctgttgcttgcaaccaaaaaccccactgataaaattcttattccttcccttcctttctcccctgctcctcactccaggctttcctccaaatgccaccagaatacagaacagaccacatggtcagaggaattgcacttctatagagtttgaagtgagaaagcagcacatgctccataaacaggctgaaatcgaggtcccttcagctgcaactgaaatgttacaagagagacagatcccacggtggaaaccaggctttgtaatgacagagccccggattcaaaatcctgctgtatgaccttgtgcaattacttagtttctctgatcatcagtttcctcataagtgtacacacacacacatacacacatacaaacatttttttttttttgagatggagtctcgctcttttgccaggctagaatgcaatggcgcaatctcggctcactgcaacctgcatctcccaggctcaagcgattctcctgcgtcagcctcctgagtagctgggactacaggtgcgctacaccacgcccagctgatttttgtatttttagtagagacggggtttcaccttgttgccaaggatggtctcgatctcttgaccttgtgatccgtctgcctcggcctcccaaagtgctgggattacaggcatgagccaccactcccggcccacatttttaaaataaaagatatgttttaagtaattggcttacatgattgagggggccagtaaatctgaaatcttttacttgaagtcaactgacttgtagatggtaaccatgtctacaaaatgctttcacagcaacacctagattcatgtttgattacataactaggtactatagcctaacagagttgactaagaaaactaaccgtcacagagatcataacactactttgtatccttgagtattaaacaagctaaatgcttataaagtacttagcacagtgcctgccatttataggaacgcaataggcagtagactcttttctaacaagcgtttgttagaaaggcattttctgttagcagaggcaggaaaggataatataatagcattcatgcaatgtgctggaaaccaggctctatcctaagcactttataaatattaactgatatttactgattttatttaatcccccaactaccctaagagttaggtaatcttatttagatgaggaaatagtgatccagagaggttaagtaaattgccgaaggtcacacagccagcctgtggtatgccagtaggcaagtaactgcctctctgaatcaggctgcccatgagtggtctctgcagcatgtattacccaagagaatgtcttcccaagtgtcaactccagttaaaaccttgagataaagtgtgccctgccctatcactttaaggaaaactccacccaatcccacaaacatggccagatttagttgccagtatatttttgaaaaatattttagggtagaatatcacacccccaccacactcccccctctactccaccatctccccatgataagaaaaagccaacacctttccatctaagaaaacttggcggaggtccctccccacacacaaagaatggctgcttctacgcacttctatcaggagcgtcgtacaactaacgaactttccaaacaaagaaacagcaagtcagaaataaaatcatgtgctaattgtggttttcctggaatggatgactatataatattctaatcaaaaagctggaatcacatttgcgtttagacaaggcttgttagaaaaatacatgagaataaaaggaggccgtaagaccacgggtgcttctcccaaggccagtcattactgctcagggcaggcagccagcaagtgggaagttgcccaattttggtcaagtccagaactccagggatgcccccttgtgtccactagctctcttaggggcccccaaatcctacttacactacggccacctaacagcattcaggcagctcccatatcagtttgcagttagcgggaatcctctcccacagcaggtgttcttttttccttttcaaaaccatgctggaaatttaatattcagtaaaatagagtgccatgataatgtttaaaatccggccaggtgcagtggctcatgcctataatcctagcactttgggaggccaaggcaggctgatcacttgagtccaggagtttgagaccagcctggacaacatggcaaaacctcatctctacaaaaaatgcaaaaattaggcagggcacggtggctcacgcctgtaatcccagcactttgggaggctgaggcaggtggatcacctgagctcaggagttgagaccagcttggccaacataatgaaaccctgtctctactaaaaatacaaaaattagccaggcacagtggcgggcgcctggctaatcccagctactcaggaggctgaggcaggagaatcgcttgaacctgggaggtggaggttgcagtgacccaagatcacgccactgcactccatcctgtacaacagcaaaactctgtctcaaaaaaaataaaataaaaagaatacaaaaattagccgggcatggtggcacttgcctgtagtcccagctactgggaaggctgaggtgggaggattgcttgagctcaggaggtcgaggctgtagtgagccatgattgcaccactgtactccagcctgggcaacaacagagtgagaccccgtcttgaaaagtgaaaaaaaaattaaaaaataaaaaattaataaaataaaattaagagtcaaggaatttctaactgtgactgcttttatttgggtggaaaataattccaatgtaacaggtatgggatcataaacatataggaagacacccccaggtgtgacttcctcttgtaataaggaacatctcaaacaggccatgggccatgcatgctagggtaaaactgtgatgtacacaaatctaaacttgctagagcttgatgttttccttccatctttccttgctccttcttgatatcaaattttttctatcctccccagaaacggggcccccgggtctagagattgggatcttctggttgggcaatggctcctctacaaggcaatttcaaaagtcattctctattctgtaccaagtggtggagattaacatttcagacaggcatgatcccagatcctgaggattaatttggtagtgtttgagtgatatctaccggttacgccctggggtttggctgtctcccttgtctttatctgtcaatgtcagtgtcaaattagggagagaaagaaaataggacaagccaagggcagcctttctgggagttatgccaggctggcaagatgaggcagacagggcaatgtgctagcaggtcacgactgggtcagatgatagagaaatggggtgtctgcagggacacacatgggactttgggttcagaggactgagctaaggtcagaagttggggaggtgaattggagtctgtgttcagaaatccatactgggtatgatggtgtggtctgagcatgacagacaggccagtcacagagaggaacagaatcaaaatgcaactcccaggcctgaagatgggaaaaaaaatgcagcgtatgaataatcgtcacacacatttcattcattggttcttatccctgtcaactccttcagagccacaaggcccctgcagatactcctgccccaccttccagtcacttccaggcatccagagggattctaaagggatggcctcacaaatggctgctgtggccccgacgaacacatgcttcggcactgattgcctctccatgcaccacctgcctcccatgcacccaggcaaggtgccgtgtgcccagatggctgcagtaccctctgccatgctcaccacctctcccaggccttcccactgcaggccatgtctatatctctctgcctgtgggctttctgtggtgacgggaccccaccccctcttcacacagcaggatgcaggagaattcacagcccctctagctgccccagcagcagcccccagccaatgactgaaggagttgctgtaaataccccaccttcctcatccctaggacaaggtcaattgaaggaacatttctacatgggccttcaaggttccccaggaaaactaagctacagttgaccacagtggtaacttgcttgataatgcatgtcttaatggctgcttttccttccctgtcccactttcctatgtctttactggtgtttcccaataaattacttgcacttgaatgtttgactttggctgtgacagtctaaaacatttccagcctatctctctgacctcctactgttgattcttcacacggcagcctgagtggtctttgtaaattatttatttatttatttatttatttatttatttatatgaaaatagagtagagacaggctctcactatattgcccaggctggtcttgaactcctgagctcaagcaatcttcctgccttggcctcccaaagtgctggaattacaggcatgagtctccatgcccggccctgagtgtcctttgataatatcaatcagggcagatcacgtccttgctcaaaactttccaagaataaaaatgcaaaacacttcctatggactgtgaggttctgtgcaacctctgtgatctggcccctgctctacctctcccttcactccctctgctccagccacaacggccatctcgctgtccttcaaacgctctgagttctctcctgccttcagtctcgtgtgcctgcttttccccttcctggagaactctgcacttagacctctgaggggctcactccttgtcaatgttattcaagtgtcagctcaaaaatcacctcctccaagaagccttttctgactacccaatctcagatagccctgttctcaaccccctgcccagttagtcttcaacactgatgactacctaaagctctcttgggtatgtatttgttgacgtgttaattttatgcctcttgttctcaccctggtgcctagaacattgcccaacacatagtaggcacttgataaatatttgtggaatgaagaatgatccaagcaagagaagaagagaaattaagacaatggcaatagcaatggagaagaagagatcaattgggaaaatatataggggagggaagcagtgatatcagatgacctattagatatagaaggtaagggaatggaggctgacaccaagcttgagagcctgcagggatagggatgccattcaccacaacagtgagtgcaggaaagggccaggcctggagggaaagatggtgagttcatgtggacatgatgcatgtgagaagtccatgaaatgtccaaatggagatgtccagcaaagggttaaaaatataggtctggagcatcagagaaaggaggaaactaaagatttgaatctggaaggggtcagcaatgtgcaattgagcctgtggaatagaatgacatcactggaggaaaacattagagaaaagtttgcaaactaagttgctttcagggaccaagaaaataattcagatgagtgaagtagctcaaatcagaactataaagagtggtggttagtgcagtgagaattcaaaataatatctgccttcttgaaagactttcatagtaaacgttatttaaacactatgggggccaagcaaaacaggtctggtgtaggccactaatgtgaggcctttaatgtagaatgagaagtttccctgtgctactagaccctgagaacaccaacatttaataggcaggcatagaataaagagtttccaaatgagactgatgaggagcaagaagagaggtggggtaaacccaacaagagtcatggtgcagaagtcaaagaagtcagcattatcaaatgctgccgatgggtccaatggagtggaatccaaaaggatccctggatttagccagagggagttcattaatggcaagagcaggagcaatgtcaacaggaagggagtggaagacagaagccaggcacaatttgatgagaaatccatggaaaatgaggatgtggcaacagtaagaggataggccattctttcaagaagttcgtcagtgaaggagaggacggggacccagtaatttcatcctggatatgcaacagaaatgagtacttgtgtgcaaaaaaatgtagaaaaaatgttgatagtagctttatttatttatttatttatttatttatttatttatttatttattgagacagagtcttgctctgtcacccaggctggagggcaatggcacgatctcggctcactgcaacttccacctcccgggttcaagtgattctcctgcctcagcctcctgagtagctgggattacaggcacccgccaccacgcatggctaatttttttgtatttttagtagagatgggatttcaccatgttggccagactggttttgaactcctgacctaaagcgacccgcacacctcagcctctcaaagtgctaggattacaggtatgagccactgtgcccggacagctttatttatttatttatttatttatttatttatttatttattcatttatatttttgaggcaggtctcactctgtcacccaggctggagtgcagtggcataatctcggctcactgcaacctccatctccagggttcaagtgattctcctgccttagcctcttgagtgaggttgggactacaggtgtgcaccaccacacccagctaatttttgtacacaacgaactcagctaggaagctggaaatactctgtatcttggatttgggtggtggttccaggggtatatacctatgtagaaattctttaagctgtacacttaagatttgtataaacataagatgtgtgtatggctgggcacggtggctcatgcctgtaatcccagcactttgcgaggctaaggcgggtggatcacctgaggtcaggagtttgagaccagcctggccaacatggagaaaccccgtctctactaaaaatacaaaaattagctgggcatggtggcacttgcctgtaatcccagctactcgggaggctgaggcaggagaatcacttgaactctagaggcagaggttgcagtgagccaaggttgcaccattgcaattcagcctgggcaacaagagtgaaactccgtctcagagagaaaaaaaagatgtgtgtatataatacttcaattaaaaggtgagaaaataggccaggcacagtggctcacgcctgtaattccagcattctgggaggccgaggcaggtggatcacttgaggtcaggcgtttttttaattgtttttgtttttctttttgtttttttgagacggagtttcgctcttcttgcccaggctggagtgtaatggcgcgatctcggctcaccgcaacctccgcctcccgggttcaagcgattctcctgcctcagcctcctgagtagctaggattacaggcatgtgccaccaccccagctaattttgtatttttagtagagacggggtttctccatgttggtcaggctggtcttgaactcccgacctcaggtgatccgcccgcctcggcttcccaaactgctgggattacaggcgtgagccaccgaacccggccgaggtcaggcgtttgagactagcctggccaacatggcaaaaccccatctctactaaaaatacagaaaattagccgggcatggtggtgggcgcctgtaatctcaactacttaggagactgaggcaggagaattgcttcaacccaggaggcggaggttgcagtaagctgagatcatgccgctgtactccagcctgcgtgacagagagaaactccgtctcaaaaaaaaaaaaaaaaaaaaaaaaaaaaaaaaaccactgagaaaataaaggagagaaagaagacatttggctgaggaggagactgggattttcttttagaaccagctcagttcctgctttaggtctaatgttagagctgctgtggacattttggcacagaagaaaaagttgaaacaaaaaaagactatcacaaattatgtatgaattacaagggaaaaatggtaactttatttatttattttttgagacagtcttgctctgtcgcccaggctggaatgcagtgccatgatcatggttcactgcagccttgaactcctaggctcaagagatcctcccacctcagactcctcagtagctaggactaaaggtgcacaccaccatgtccagccaattttaaatttttctgtagagacgaagtctcactttgttgctcagactggtcttgaactcctggactcaagtgatcctcccacttcagcctcccaaagtgctgagattacaggcatgaaccactgtgcccagcccaaaacagtaactttatagtagagaaaaagcaagaaaccaaagctaatctcaccaatactagagcaaactgacatcctgtgtccactgataggatgtactgggaaggacacagtatcatttcagtggtatttctgtcaaaaatacagaacctgaattttatcatgagaaaataatagacaagtccaaatttaggtacattataccatataactggtcttaatcttcaaaatgtcaagataaaaaaaacacaaagagggccaggtgcagtggctcacgcctgtaatcccagcactttgggaggctgaggcgggcggatcttgaggtcaggagttcgagactagcctggccaacatggtgaaaccctgtctctactaaagatacaaaaaattagctgggcgtggtggcaggcacctgtaatcccagctacttaggaggctgaggcaggagaatcacctgaacccaggaggcagaggttgcaatgagctgagattgcaccattgcactccagcctgggcaacagggtgaggctctgtctaaaaaaagaaacaaagaaaggctgagaaactgttccagattaaagaaaattaaagaaacctgataatttaaaacagtatgtattcctgaagtggtttttggacccagaaaacatctgtaatgggcattattgtgataattgaaaaaataattaaatatgaactatacattaggtaatagtctagtatcaagtgtaaaatttttttgattttgataactactatggttatatggttgtccttaggaaacatacactgaagtatttgggaataagggggcatgatggcttcaacttgcttttttttttaagagatggggtctcactatgtgtcccagcctgggctcaaactcctgggcttaagtgagactcctccctcagcctcccgagtagttggaactacaggcatcaactaactttttaatggcttagaaaaaatgcagagagagcaagtgagtgaaaaagagaaaacaaatgggacaaaatgtgaacaattggtgaatttgagagcaggttatatgggaatgcctggtactattcttgcaacttttctataagtcagaaattatatcaaaacaaaaaagtatcaaaaataaacaatactccccagacatggtggttcatgcctataattccagcactttgggaggccaaagtgagaggatcagttgagcccaggagttcgagaccagccctgggcacgtgagaccccttctctacaaaaaatttaaaaattagccaagcatggtggcactcatctgtagtcccagcaactccagaggctgaggcaggaggatcgcttgagcccaggagctccaagctgccatgagccctaatagtgtcactgcactccagccggggcaaaagagtaagaccctgtctcaaaacaaacaaacaaatcaaagcatgacaatttaataaacaaaaacaacattgtgtctctataaagttttttaaaatttttaaaataagatgtggtacctttgatataaaagggaagggcccaggccagtcttgtgaaagcataaagaaaaaacaccctttctcccagggccacatgcctttcccagcttgaatcagggaatgagagaggcacctgggtcccagcattcctggacaaacaaacagaacacaccagacagctaaaggaccgcagccctggctttggggatttcttggttatggcatttcagaatttttgccagtaataattgtccaaacacacacacacacacacacacacacacacacacacaagaaccttgccacaagggactagcttgagactaagctattttcaccttggaatgataatatatcaatcagtgcggtcaaggtcacaagctttggagtttgtttttttctgggttcaaactccaactttaccacttgagagaaggatgtccttgggcaagtccacttgatctcagtggatttcaccttactcatccttaacacaaggctttagtagtacctatctcacagagccattgtgagaaataaatgaaataatgaatgccaggtactcggcactatctctgcctcacagaaggcactcaataagtgcaaacaaatatgtaaaaaacagtaaaatgattctaggagttagatgtgtttcaaaagctggttaaggggctgaggactttcctaggaataacttgtgctcaccgaatatttactccatgcctgtcacatggaatatttgatctcatttaattttcaaaaccacccaatgagtcaagtattatttgtattttacagacaagaaaataagatctagaatgggtaagctgtttgctgaaagtcccccagcaaataagagttggattattccagagcaagcttgtccaacccacagcccacaggccacatgcagccaggagggctttgaatgcagcccaacacaaattcataaactttcttaaaacattatgaggttttttgtgattttttttttttttttagctcataagtcactgttagtggtagtatattttatgtttggcccaaggcaattcttcttcttccaatgtggaccagggaagccaaaatattgaacacctttgtataaggcaacccagtttggtgccaagacaaagaggttgagggatgatatgagcaccatcaaatgtctgtcttcaagactgtccttcaactggtaacctagaaggtcccaagtctaaatggggatcaagtgagttgggccaagtgggctgcaatggcttttgaaggaagccaaccaaagctattgcctaagatatcccagcctgggttccagaagcttagaccgcaaccagtgatgactccaaaatggggctggctgctactggaagcagtacccttggcacagatagaaaagttgtcagcaatgggcactggccaccttagcatggatgctggcgggtaccagcagccatgcgtcttctgctgatatcagcaggaagcacctggtgacaagctgaagtcttagagcaggaatttggagatggagggcttgagggtacggataagaggaccagactaggggacacctatcaacaccactgccaaggactctcatcacaaagggggaagtggaagcaaagcaagaagagaactactgcttggtaagagaactgcttttttttttttttttttttttttgtcacccaggctggagtgcagctgcaggatctgcgctaactgcaacctctgcctcctgggttgaagcgattcttctgcctcagcctcctgagtagctgggactacaagcaggcgccactacgcctggctaatttttgtatttttagtagagacagggtttcaccatattggccaggatggtttcaaactcctgacctcatgatctgcccacctaggcctcccaaagtgctgggattacaggcgtgagccaccgcgcctggtgaggactccattttctacccctaggctaaagagcctggaggattatagcttacagagcagagaagaactctgatactcatacctgcatagtgctagctagtcagtagacaatacttagataattcattttctgatttctgacattagtgagaggttggggttttgtttgtttaataacagccttcatttagatctttgcaaacagccttgaatgaggaatgtccttatgtttcagggaacatatcaggcctggaagcagcttttttaggataaagctcactcattgaacttcaaatgcactgactccaaccatttcctaaaataaggaaaatctgtctgcacagacggcattttcactctcctgaatgttttctgttggttggttggttggttggttttattggttggttggttttgatacagagtgatacaatatcatgaagaatattagtcagaaatggggcacaggtctcaagcaggtcttgggaccttgggctattaatctttctgggccttaatttacttatctataacataaaaggaccttaatatatgattgagaaggcccaaaccacctttaaaatttagatctgtgtctccccatcagacctctctggagacacaggatcttattcaacctcacacagattcttgggtttctgccattcacatctacattgaaaattctcccataaactttatacaagtccttatggaatcattaaagctttgcaagaaaacaacagtacccattataaaagcccaagaaacagagaagaaaatcatgttttataacccaagaaatctgtccaaatcctagaatttttcttcagagtacatcacaagaaggaacagtctcttccttcctagtgggaaagtcagggtttctttcatttccaccttgttcgcttgtaaccgctctcaccaggcaaagttctgagcaagtgagatggactcatctcggaactccaggctgtgtttacataattggtaaaagaaacattccaatcccattccttcgtcagctccgacagaccaaccagcatccccctcccacttgccactttgataggggtgactggtatctccatctccttatctttgttgatcatgtttctgggtttccaattgcgtcaatttaactggttgccaataattctgtcatctgaggggaaagcagaatctcaactgaacatgcagatgtcctattgagactttgcccataagggagcgtctttggtgcttaaaattccatcttttggacctcatatcagttgatgtttttagttgcatcggaaaccaactctaagtgatttaagcaggagagaaagttatttaaggatatttatagttcacagaatctctggaggagcggggggctagaaaaccagacttgaagactacacagagagactccgagtccccctgggactgacctgagatgaccagggagctggtatttttagcttccagaggtaaataacagccttcacttccatcaaaactcattaggtagaaaacacaccaaacatgggaaaggcgttccggagctgggctaccaaagagaataataaatgttcactatagtttcatcttctagttttgtaccatccctgaaacattttctttttcctccaggagcctcaaaattacagttaagtctacagtcagacagaaggaaactggcatttattaaacaccaactttgtgcctggaagattcacttacaatatcataatctttacaataactctgcaatatggatctcattatcagcattctttttttgtttgtttggttggttggttttggtggttttagtgtcagggtctcactctgttgctcaggctggagcatggtggcatgatcataactcactgcagccttgaactcctggaatcaaatgatcctcccacctcacctccaagtagctgggactacaggcatgcaccatcatgcccagctaattttctttttctttttttttaagaggtaggatcttgctataatgcccaggttggtctcaaactcctggtatcaagtgatcctcccatcttggcctcccaaagtgcgggaattacaggtgtgaaccactgcacccaacctcattctcagcattcttattatgttttgtcttattatcctccaaggataggttaagtaattgttatgggttgaattgggtctccccaaaattcctatgttaaagtcctaatcccagtatctcaaaatgaaggtaaggtctttatagaggtaatcaagttaaaatgatgttattaggatgggcattaattcaatatgactagtctccttataaaaagcagacattcacacacaaggacacatgcacacagggaatatgatacctgagattagggtgatgcgtctgcaggccaaagaatgccaaagactgccagcacaccaccagaaactgggggagaggcatggaacggattcttcttcacagctctcagaaagaaccatgctgctgacaccttgatcttggaattctagccactggaactgtaaaacaataaatttctattgtttaagtcatctagtttgtgagactttattaccattgccatagcaaactactacaggaattcacctcaattctcatagcgaatgagaagcagaaccagatttgaacacaggtctggccaattctaacacaccagcctcttcactatgactgtatcataatttccctccaccaaaaactctggggtggtctatagcctacacttaatggtgatcagatattttaagctgaaggacctaattttggtgggaaagatgccagtttgggtcatgttgagtttaggtgcctgataataccctggcgttcaataaacacttggatatatgaatctgagttcagggagatatccaagctcaagagaggcaatcagaagtcattaacacacaagtaaaaatggaaaccctgagtgtgaatcagatcaacaagaaagagcacactaagaaccagtgggcctaggatgatccctggagtagcaatgatttctttttgccaccttatgtccatttttttccttctcccatagtaatagaatttttaactgagcacatgggcttcagagtaaagactacacttcccaggcttccttgcagctaggtatgaccatgttcaggctaaagggatgttagtgtcaccttcctgaaaattcccttatgaggtagtttatgccctttatttactctttttctctgtctttcttccatcttgctccctggaacttggatgttgccttgattcacaaggatgaggatcattcccaaggaattgtagggcagttaattggaagaggactgtcttagtccatttgtgttgctataaatgtatagctgatactgggaatttataaagaaaaaatcatttggcttataattctgctctctgggagactgggcatctggtgaaagcctcaggctgcttccactcatgtcagaaggtgtaggagagacagcacgtgcagagaccacatgggaagagaggaagctagagggggaggtaggggaggagccaggctttctatcaaccagctctcatggaagctaatagagtgagaactcattcagtctccctaccctccagggaaggcattaatctattcataagtgatccacccccctgacccaaacacctccaattaggtcctatctccaccacttgggatcaaatttcaatatgagatttggagggtacaacatccaaactagagaaagacctgtgatcctgaggacttcctgaagtggagatgccataccagctctggactgcaaatatctggacatttgtatgacagctaaacaattatcttgttcaagtcaatgttgcttttttttttttttttttttttttttggttattctttgctatacccaatcccaactaatatacacggtgaacaccaggatataggaggtagacataggaaagagatcaaaaaggaatggccaagataatggacatctattgttatacatactcataagagcatcactcttctggaaataattcttctaaccagttgttcagttgagaattgccaccttcttataggccctgccttccagactacaattaaatgtgactagccagttatagtaattggtccaggtatgggcacttgacccccaataaaccaatcaatgcccttctttgagctttcttttaccttgggttcaaggaaagcagttctcagaccttctatgatgttcaaggccaggagccattgatggcaatatctcttacacatggagagacctgtcgtcttagtctctttgtgctgctataacaaaatgcctgagactcggtgatttattaagcccagaaacattttctcacagttctgaaggctgggaagtccaagatcaaagtacctgccagtttggttgcctggtgagggccgctccgtaattccaaaatgatgccttgttgctgcatcctccagagaagaggaatcgtgtgtcctcacatggcagaagacagaagggcaagggagccacatgaagcctcttttataagagccttcatttataagaaagaagcttcatggcctattcacctcttaaaggccctatctctaatactatcacattagccattaagtttcaacacctgaattctggagtggactcattcaaaccatagtcatctgagagaatgaagtcatcatggaaaaaggagaagcgacaaaaggcctggagaattctgccaccatcatctctagtacagttgcaactgcccaagaggtttgccttgcccactgcctagacagagccaattcatcaagacaggggaattgcaatagagaaagagtaattcactcagagccagctgtgccagagaccggagttttattattactcaaatcagtctccctgagcattctggagcagggtttttaaggataacttgatgggtggggggaagccagtgaaccaggagtgctgataggtcagagatgaaatcatagggagtcgaaggtgtcttcttgcactgagtcagctcctgggtggggaccacaagatcagatgacccagtttattgatccgggtggtgccagctgatctatcaactgcaaggtctgcaaaatatctcaagcactgatcttaggagcagtttaggatgggtcagaatcttgtagcctccagctgcatgactcctaaaccataatttctaatcttgtggctaatgttagtcctacaaaggcaatccggtccccgggcaagaaggaggtctgctttgggaaagggctgttgctgtctttgtttaaactataaactaagtttctcccaaagttagttcagcctacgcccaagaatgaacaaggacagcttgaaggttagaagcaagatggagttggttaagttagatctctttcactgtctcagtcataattttgcaaaggtggtttcacagtctttcctaagttacgtccatattgctttttttatcagagcttcccacatgagctaattcattccaactcttattagaaatctagttgaagttgggtttctgccatttatgaccaaaagtcctgagtgatataatcagagagctacaaggaaaatcaagaaagtgtgctgtcatggaagaggatgttaaggaggaattgatagtgtcaggggcagtagaagggtctggtcaattaaagaccaaaaagtgcctgatggatttggcaattaaggtggtcaccattatgacagcgattccttgaagttaaggttagaatcagatttcaatgagttcaagagtgaacaggaagttaagaagaggagacagtgaattacaaagacctctgctgaggaattggaaaggaaaggaaagaaaaggaggaagtttaaagggtagctacagggggccttgtgttaataagggttttgttaaaaagcaaaattgttctgcgtatttataggctgagcagtagcagttagagatttggtaaaggatttgggggggtgcaaaaattgatgaggcaaggcccaaattagaataggagggaaaggaattaaagtcaaaggataagtgttgaacgggaggaaagatacttgttctttcttaaggaaagatggtaaagaacaggtgcaagtggagtgagcaaactgagtctctcacctttgatggcctcagttttctcatgcagaaagggcagactctcctagtgaaatggaagagagcaagagtaaagagggaagttgaggcaagcagtgacactttcttctttgattaatgaggggattaggaaaggaggctgctctaggacggctctgagggctgggactggggaccatggaggggctgttctgggtctttctgtggttttctccagcagtggtcttccgtcctggttagtggaggagagaagcagcagcagcattactctaggacggagatttcaagggggggcaaagaccaaggattgaggaatagaggtgcaggggagagggtgttctgatgctatgacacaggacccatgctgggtaaaggggaggaggagaggctggacacctgagccctagagaagggaacagatgcaggggagagggaggacatggagacttactggcgcacaacccagagaacattctggcatcaactgggcaaggaagaaaattccacagactctaaattttaaaatagagctttgctgtttttaagacctgtattacagggaggaaggaagagagtgcttgccagccggggtcggggaccatcatcccagctccttcatacacttacctacatttaggctttctcatgtatcttaagcaactgtgaatacccgagacccgctattccacacacagccttccaagaattgctttgtgatacacaggtatcacagagaggtcctgtgctggcaccaaaaattaaaaagaaaaatccaggagaggaaactgataacttgcatttgcaaacatacatttgaaaacaaggttaaatacacatttgaaaacaagaagaatggccgggcgcggtgactcacgcctgtaatcccagcacttcgggaggccgaggcgggcggatcacgaggtcaggagatcgagaccgaccatcccggctaacacgatgaaaccccgtctctactaaaaatacaaaaaaattagccgggcatggtggcgggagcctgtagtccagctactcaggaagctgaggcaggagaatggcgtgaaccagggaggcggagcttgcagtgagccgagatcatgcgcactccagcctgggcgacagagagagactccgtctcaaaaaacaaacaaaaacaaacaaacaaacaaaaaagaagcgtcggagtattcagaagaagcaaggggagtgtgacattgcccgtctgtaaaggtgctcatgacagggggtcagaggaatcaaacattaaggatcatttccactggtttagtttttggctgaatgtgtgacgtgaacttctgattttggggggctggtttcctagtcatcttccttgattctgcataaccgagggtccctcttcagactggaccctagcaggaagtgactccccatggttacaatgcagatgaaagcaaacatagaacccttaggttagaaggttagaggcagcagccagggataacacaacgagggaaacagccctccacacacagagactggtagcaacccagttatctgtctctctctctctcagctctctctcggtctctcccccaggctggagtacagtggcgcaatcatggctcactgcagcctcgaactcctaggctcaggcagtcttcccacctcagcctcccgagtagctgggaccacaggcgcgcgccaccatacccagcttcaacctgttgtagtagttattaaggaattattttaggcagatagagagaaaaaggggtccttgggaagttttctttttttaagacatctctggaaaatgttcttgtaaagccagaccggcaaactttgataacctttgatatgcaaatccaggccattagaagctgggtccacccaaacatggccattccctcctttttcttcttgcccttgccccacatgtgcctggtgacatggccacccccacaaatccccatgtgtgtagaacatcatggtgccctgtatttgcatattaaaaggctagggtgggagggccagctttttctccggctacatgaatcacatgcctggtcaaaccaatcccctaagccctatgcaaatcagacatcgcctcctccagcctctgcatatacacctggctggtatccgtggcaggcgggcacctcctctttcggctttgcagcccccctccctctgtctctgtacgggggagcttcttatgtcttctctcctccttcttgcctattaaacgatccactccataaaaccactctacttgtgtctgtgtcgttttatctaaaccggcatgaggaccaagaaccctggtgttcctccactcatcggagctgtatcaaacccagttcttaaggtctgagaattaagcaagaaaagaaccaaatgcttggcttcagtgttaaatgtcccagaaggggaggtaggctgggctctagttctgggagctcagagcaaaccagcaggaacccaggccatcccaggcccccagcactgccattccttaggaagggaggatctgctacagaacacttttgagacttgatcatttataatctataaatatgtatcacactctacgtctaggtctccttttagagtgtgggttcacttacccttaacaaatctttttgtcactttcacaaagtccccagattaaagaaacattcttctactataaatagacacccagacccaggaaccatgcctggtgcgatctcagctcactgcaacctccgcctcccaggttcaagtgattctcctgcctcagcctcccgagttgctgggattacaggcatgcaccaccacgcccggctaattttgtattttttagtagagacggggtttctccatgttggtcaggctggtcttgaactcctgacctcaggtgatctgcctgcctcggcctcccaaagtgctgggattacaggcgtgattcacctcacccagcccaaaatattattttaacaaaactaatctcctggtgtgtgctgtgtacagatataccacatttttcttatgtttatttcatcacaagtatgtgtgtatatcagataggaatctttcagttgccaattacagaaaactcaacttaaactggtttacccaataaaggggttttattagctcatgttttcagcaaatatctatcaagagcctactatgtgttgtgcaattgaaaagtttgaagatggtactagatttaggcaaagcctgatccagtagcctaaacagttttagcaaagacttgagtggtgtctttgcctctgctctggcttccatgtatccatccttaagctccacatgctagtccttcagctctcacttaccccacccagcaccatcccctccgtacgttgctctgtcatgtggaagagagagtctctctcagaacccctgggattcactctctgtggccatccatgtgcctgatcccaaccaatcagggtggctgagaatgggatttggtgagctgcctagaccagtgaaacctaccccaggaggtgggaatggagccaaatgcaccccagctacttccaggcgaagtggattccccagaagagaataagagtgaatggatgcagagaagcaagggacaaatagtcgtcaccgcattgtgtcattgttccggctacatggaaagctctccataatgattgagagcacaggctgatgccaggctgactgagttagaatcctggcttcacacttatcagctgtgtgactttgggcatgtcacttaacctctctgtgtctcagttttctcatctgtaaagtgaggataatagcacctgcctcataggattgaggattgtgatgaggattaaatgagttagtatttgtaaagcaattggaatagtgaatgatacgtagcaagcacttaaaagtgcactgtgaacacagtagggggcccaataaatgcttgcagagtgggtgaaggtacaaagctgggagcaagtcccactactgtccagactttcacccccagccactccatctctcagggcagatcctcctgccttggggtctgctgttttggagatattttcccagaaagctggcagctgggcagcgatgagtgccccccacctatgattaagatggcataaccctagatggcatcattagagcaccatttttccctacaaactgatgagaaatccataggggtgaattctgggggcccatcaaggcactcctggaataaatgatctacatgtgccatgatcatctgtatgacgatttcaggctgttttatccccagcctgtgacttttcacgcttcctaaactgtataaaaatgaactgcaatcaggctgatctatagatagacagttcctgtttctgagcatgctgaatgagggtgggtgtgttgatacatttgcataaagctgatggatgtagaaggctatggttttttggttttgtttttgttttttttgaggggttggggtgtccttttggaagtggagccagagaagaggtaaaattaaggaaagtaaaaatagggcagactcatagctttttcatatgaaaatgaaggaggcagtagctacaagatagtttactgatgctctgtctgcaaggaaaaaatgggctggtttgaaaagcaaaacaaaactgaccaacaggtgactgggagggatggggaaaggggtgtgatctgtctttcctgtctgcctcctctctgcttttttcatgtatacacgtaagggaaagatgtaatagtctctgttttctatgtacagggatatttagatatgcaaatgagcacagcctgttaatgagctgagggtgattacactgcagggagctgccagcccctgctgaacaataggtgaagagacaccaggtgtctgtgaagggggaaggggacctccccacccctgcctctgtgcctctgacctgtctgcagaatgaaactgttaggccaagttcttatgctccttctagctcccagatcctgaatctaatgagttaaggtgagcagcgggagaccaggtaagccctggggctcatcagggaactgatgagcaggtaagctccggaggctcccgaaccttacctgggccgggaagggtgatgggcagccagtgaagcatgaagctgcctcagatgggcaggaccacttggcaagtgctatggaattggggtgggagaagcaggaccctatggagtgagcaggtcatgctgcgtctctttgggcagcatttggtcacaagatggtgactgggcacctgtgtgcttatcagaagtcacggcaaagttttgcaatgagaaacaggaaatgaaggagtccgcttttaatttctagggagagatgctcagtattagtaaaaaggacgtggactttggagttgtacacatctgagtttgttgggctagacacattggacatgttatacccatgaaccctggctgacaaggtgccagccacacagccaatctcccctactgataagataaaggacttggcctatcacatatgactctcctgacaaccacttgatggttacctagcgaaggaggtaattaacaaagaatcttacaagaaactcgtgttgctcgggcaaatgcccggcctggacatcccaggtccagaggagtggaaagaacccagccagttccaacgggatctgcaacgtactttctgacctgttgttctgacggcaacagagcaggacactgtcatcgcctgccagcctccaagtctctgtgacactgtctcaaaacagtctaaagctttaagtcccctcaaacctcccacatctgccatgtggctggatcactccaaaatcaggacatgtccctaaccttctattaagggcattcgactttataccatgtcactgagcatcactcaatcctgcctataaatatggatgctatgctaacaagacttattgctgatttaatggcagtgagtacaggctggtgtgctgcacacatacacagagaatggtattgaaaaatgggaatgataattagagtttaataaatggtaatttgctccttgctgctgtgtgtgacaggggttggggagggatgaaatagaggggcccttccagaaagtgaaatgtggatagaacgtatgccatgacagctttattttaattttcacattgcccaggattgaagttaatgctcatttacctacagatccttttccctggaaatcacctcttgtggaacatgagtggagaagacaattagacaagaaatatttatcactgggaccaaattttaactagagtcatagaatgaagaggtcagggctccagagacaaagtgaagcagagaattaaaataattatctggatcattcaggggaaataaaatcattgtttttgcttgagtgagtgtctgaatgatctaaataattgtccccaccctttgttttggtctggtagtgaagacctggccaatcgatccagtagcaaaggatggaagttggaagtttgtggcgagaaaggacaggaaggctgagtaagcctgaatccccctggtcctgcaggcctgagcattgggcagaggctggcccagtccagagcttgggctggagagggaaggatggtattcctggaagctagagaccagaaagtaagcaacgctgaaagtcgcatgggaaaccaaggtcgacaaacccagaatacagccagaaggagccaggtttagtgagtgaatccaggaagctaaaagattaagcagaacagaatcatgaggggtgtgtgtgtgtgtgtttgtgtgtgtagttaggaaaggttaaacaattgactataccagaggtttgcagcttcttggactccactggccaatcaagagaagtggaatttttctggggcagtggcggtatgctagtgtgcaaatggaaggtatggtgttattcagcgggccctgcaagtctccccttcccagaaacaactactttatttctagatatagaataataataatagtaaaaagacagctactttatgtaaatgcatgaatgatccattgcttgagatttattcgtggcctacttgtgtgttcatttttcaaacacaaattttccttggaggacaaatcagtagtttccaagcttactatagaaattaacaataactaattgtggtagattttaaattccacagttattcaatattgttccttttaagagacagaacttaattcccatctccttgagcatggcttggactgggtgactcatgaccgataaaatatagcagaagttatggtgtgtgatttccaagtctgggttataaagtgttttgtagattcctcctagttccctcttttggattgtttgctaaggtagaagccacctgccacatcactaggacacacaagcagccaatgcagatgtccatggagtaaggaactgaggcctcctgccaatagctgcgtgagtgtgccaccttggaagcagactgtccagccccagtcaaaccttcaaatgactgcggccccagctgacatttcactgcatcttcgtgaaaggccatcaaccagaaccacccatctaagccattcctaatttctagtcctcggaaactgagttatctaataaatgtttgttattttaagctgctaaattttgggatggtttgttactcatcaataaatattacaataatcatagctaagatttactgaacatgtacatgtggcaggcttcacatatattaacatatttaaatggcttaacaatcatatgagatagttactattaccagctccattttgtagttgaggaaactgaagtatacaaagttatacatagtgaatactgttagttccctttcctggctgtaaatgttggctgctaaagactcacagcttcccctctttccagagaattgcccctggctggataggagtggtctcacctaggaagttatacactgccttcccctcccactatggcagccctcagccactgactagttgatgcagggcaggaccaccacaaagtgggaccaactgtatggtgcaattctccctccaaatttttttgcggtggagtcaagcaaaagctagactctagctgggattacattcttgcttagatccatttgctacctctatcctgctttccttgccccttttctcccaaaagcactccctcaataaatcaagtgcgttggaatcttgtctcaggctctttttaaggaactcaacctaagttaggcatagtgatttacccaaagtcattgctatggtttaaatatttgtcccctcccaaactcatgttgccatttaattgccattgtgatggcattaagaggtgagaccactaagaggtgattaggccatgagcactccgctctcaagaatggattaatgccattatcaaaggagtgggttcttataaaaggtccagttttccccttttttctctctcttatcctcttgccttcctccatgggatgatacagcaagaggatcctcacaagatgctggcaccttgatcttggacttcccagcctctagaactgtgagaaataaatttccattctttataaattagtccatcccaaatattctgttgtagcaccaaaatggactaagacagccaaacagcctgggtttgcacgcgacagtctgacttcagagttcttgcccttaaaaatatctctggaagagtaacaaataccagtagagagcagtagcacaatcatagttcactgcaaccttgaactcctgggctcaagccatcctcctgccccagcctcccaagtagctgggactacaggcatgcatcaccacacctggctaatttgtaatttttttgtgtggagatggggtcttgttacattgtccaggctggtctcgaactactgggagttcctcaaggatcctcccaccaccttggcctcccaaagtgctgggattacaggcatgagccatggtgcctggccactactaaattttcagctcctattttggcatgagacaagtggtgggtggttcagttcggctttttgtaactgctagttctgtcccccaccccgccccgccaacacacaccatggatagtaccacgtgaaagccagtcctcctgcccctcatattcatcccttacctcccaccctaattaatctggtccagatcctcattcttgccatgaattttagcctcctctcttagataggatttacatgttcttgcctatagtgggtgaaattgagtcctaacccctggtacctgtgaatgtgatcttatctggaagtagaatctttgcagatgtgattaaggtaaggatctgaagatgagattatccgggatttagggtgcgtctaaatgcaatgactagtgtccttataaaagaaaggagaaattggagacaaagagacacagggggaaaaccacatgaagacagggtgtagagatcagagggatacatctgcaagccacagcatgccaggattggattgcagagccacagaagcgaggagatacacagggaacagattctccctcggagcctccagaaagaaccagccctgctgacaccttgattccaaacttctggccttcagagctatgagacaacacgtttccattatgtcaagccttccagtatgtggtcatttgttatggcggccacaggaaacaaatacacttcccttcagaggcccctgttcatctcagccctaaacccagcagcagtctctggagtgaggttggggaattacaaaagccgtaacaggcatgcatcaccacacctggctaattgttaattttgtgtgtgtggagatggggtcttgttacattgtttacaaagccacagccttgtggttgttatagttcccattttgctttgttttgttttgttttgtttcattttgttttttacaatcgaggaaatgggcccaggaagttcaagtgattttttccaaagtcccttacaccagcagtccccaacctgtttgacaccagggaccagttttgtggaagacaattttttcatggacaaggggcaggggggaaatggttttgggctgaaactgttccacttcagatcatcagacattagttagattctcataaggagcacgcaaactagatccctcccatgtgcagttcacagtagggtttccgctcctacgagactctaatgacgccgctgctctgacaggaggcagagctcaggtggtcatgctcgcctgccctccactcagctcctgctctgcagcctggttcctaacaagccatggactggtactggtccctcaggggttggggacccctgccctatatagatggtgtataaagcccagattgtgggtctctagactccaaatcctgaagtttttagtcctcaagaggagactggcaatgatacaaggacactactaaagtctttctgttcactgtctataactcttcattttaaaatctaggtatttggggatatggagtgtagggggaacaggaaggtgggacctagcttcttatccttctgcctttgacagcatataatgtctcccataaagtgcagcagcaaagtctaacttaagcatttaagtgaccccttcagttccttaatgatgctataaatgcaatcctggtgtgatttataaagctattaaaataaatgcttccactgaaataaacattgctacctctcagcatatgtttacttgcataacctaagcacaaacttacccgaatatgcaaaacctgaaccaaagatgataaacggagggcctgggtgccgtacacaaatgaactggatgtgtgtgggtcttgacagcatcttctagggacagctggtctttcagactttttttttcttagtcatggtctttcagtcttgaagccttgccttgtttctcagtttggagaaatgcctccctccatggtctgacgcctagctgatgcctctctatccatgaatttcgcattatgcacagaaaagcactttttaaaatgctctcctcaacctttgtgcatggttcagctcccatggagagccccacttgagtctttaccatttttcatgtcacagaaatgtttgtaggccctgggccatgggaggttttggagcaagaggggcatgatgaaatttgctaatcacatcttggaaccatgagattttaggtctatattcaaagaggcatgaacccagggcctgaatttaattcatcttcaacctcacagctctttggactgtgctgcattggtcattatgtaagaaggaacatttgagaagaaatcgagtaggtttgagatgatgcccaggagtcataggacacaatggaaaagcaacagggaacagtttacaccagtctgtctggttcactatgatatcctcagtgcctaccatgggtgcctggcacatacagcttgctgtaaataagtgtagaaggaagtgagacagagagggaggccctagggaattcagtccaagtcctggttccactacatactagctgtgtgatgatgggaaaatttattaatttctctgaatctccacttcctcattttgaactgaggacaataatatctttctattgtaagtcttacacaatacaactcataaaaatgtctagaacggtgctgcacagaataggtgctctattccataaatgttcattgaatgaatgaatgaaagtctggctgtttccctgcggatgaatggcccttgagcttggagacattgagtatggtgcacagggacaagctgatcacttcccaaggcatgtcagtggagcgctgcctgtctccttatttatgtgccaggttttcatcatttgccatccacacttaggggattaattccctggcaagtgcagccagtaatacacagccagccatacgacacagataacagcagctacggttgtaattcccatcccattgacagcccttcaaccaacagaggaaggatggagcagctgaaagcttccattcaaagtcagtaacaataagttacaagtgactacgtatgtggagggcaagtgagagggggcaggaggagggtgagcagccagccccttctctttgtgctagtgtagcaagcaggatccagccaggaagtgtgcccaagtgcctgcttagatgttagggaaatgattaaagttttccaattttggaaacagaagtttaatagtttatttttttcctctttttacccaacacctttggaacctttaagattgtattaattggaatataaaatgtttcaggtgcagtggaaaacagcatggtgattcctcagaaattaaacatagaattactatatgatccagcaattacactgctaggtatacactcaaaagaactgaaaactaatacccaacccagtacctctccaggaatgtttattacagcagcatccacaatagccaaaaggtggaaacagtccaaatgtccatcaacagacgagtggcttaacaaattgtggcatatatagcagaatattattcagccataaaaaggaatgaagtactgatacatgctagatcgtggataaacctcaaaaactttatgctaagtgaaagcagccagacacaaaagattatgtactatatgatttcatttatatgaaatatccagaatagacaaattcacagaaatagaatggagattggttgtttgctggagctggggagagagagtaatggggagaaactgcttgataaggggtttgcattggaatcatggaaatgctttagaattggatagaggttgcacgatactgtgaaggtactaaatgtcattaaattaattaaattgttcactttaaaatggttaattttatgttatgtgaattccaccttaattttaaaaattgtatgaatgtaattatgtgaataaacacacataataaagaaaattacaaccccacatatgagtataaatgaaaactagaggctgggcgcggtgggcttgtaatcccagtactttgggatgccgaggcgggtggatcacaaggtcaggagatcgagaccatcctaacacggtgaaaccccgtctctactaaaaatacaaaaaattagccgggagtcgtggcgggcgcctgtagtcccagctactcaggaggctgaggcaggagaatgggagaatggcgtgaacccgggaggcggagcttgcagtgagctgagatcgcgccactgcactccagcctgggcaacagagtgagactccgtctcaaaaaaaaaaaaaaagaaaactaggtttcctttcctacctgaccctccattctcctcatagacaattactagagttttttgtgtacccttttagaggtatttttaagtctatatatatacatacatatatagagatatgtaaaatcatggcatgctgtacacactattctgctgtggagaatgctttgcttttgtttttgagacagggtcttgctctgtcacccaggctggagtgcagtggggtgatcattggctcactacagccttgacctcctgagctcaagcagtccttccactttggcctcctaaagtgctgggattacaggcatgagacaccacacccagctaataatgtttttgtttttgttttttgagatagagtctcactcgtctcccaggctggagtgcagtggtgcaatctaggcccactgcaacctccacctcctgggttcaaccgattctcctgcctcagtctcccatgtagctgagattacaggtgtacaccaccacgctcagctaatttttgtatttttagtagagatgaggtttcaccatgttggccagactggtctcgaattcctgacctcaagtgatccacccaccttggcctcccaaagtgctggaattacaggcgtgagccaccatgcccggacaagaatgttttaaaaataccatttaatgggtctcaactcagatctactcaatccgaattttcaaggttgggcccagggatctgtttttacaaagcaggtggttggtggggagggagctagtctagtccagcctgtggctttcctgccgttcctgagtaccaggcatcctgccttcagcttggttggcttcctggggtcttctcagaactggggactcataggctgtctggccctcagttacccttctccaatactcttctgccttcaccacccacctcagaccacctcctccccctccagataaccatgccagccccagggaccctcaccaccacgacctgccaggcctgcacttctgcaaagccaaggctagccccacctgctggcttctctgagggcactcccaagggtcagcatcttgagcctagctctctggagcctgatgaaattctcatcttctctccgttgctactcaatagctgagagaccaactcagaaaagaatgattgccagattagaatgtcaatgcgttttaaaatatctaaccagttgttgagcccctactgtataccaggtactggaataggcctttcttttgggggttgttttggtttttttgtttttttttttttttttgagacatagtctcgctctgtcacgaggctggagtgcagtggcacaatctcggctcactgcaacctccgcctcccaggttcaactgattctcctgtctcagcctcccaagtagctgggactacaggcacctgccaccacttgcattagctccctcaggtcagtctttttaaaccccatcttaccagtgaggaaggaaatggaagcttagagaggttgaggaacttgcgggctaatgcatggaaaagccaatctgactctaaaatccaactctttcctctaccccacattgtcacacagtccaagcctcatcactcgtgaagggaagtaagtgttatcagtgagaggaacctgtgcatctgtaggtgggacacctctttctgctagcaagatccccgggaactaaattatcatctgaaggtgagtgcagaataagagcctagggaggccaggcatggcagttcacgcctgtaatctcaacattttgggaggccagggtgggaggatcgcttgagcccaggagttccagaccagcctgggcaacatggcaaaaccccacctctacaaaaaatacaaacattagccaggcatggtgttgtgcgcctacagtcccacctacttgggatgctgaggtgggaggatcgcttgagcctgggaggcaaaggttgcagtgagctgtgattgcgccactgtactcctgtctagcctgggcgagagagtgagaccatgtctcagaaaaaaaagataatctagtaacctagggaacagagcatctcaaggcatcctccacaaagctgtggccacattagccttggcccacaacatattgtgccattgcattccagcctgtgcgacaaaagcgagactcagtctcaaaacaacaacaacaacaacaacaacaaaacagaattctattctctaatggcctgaatatgggcatctaccctcccctcccccttacataaggctgggtaaaccctggcaggttttctgttttgcctccttccattagggtaccaaccagcatcatcagtggggaaatagtctttggaatccatgaacctaggttcaaatcccagctcttcccttcattagctgtgtgacttcggactccagacttcagacttcagacatagctccccagatgtatatgaaactcactgcccagagttcagtcactgctggttcctctcttcctcctggcaacgcagcgttttcccaggcacgaaacccacttttcttttgccacattccagtcctgagggttatctctggtcatgtttatgggacttgggtaatcttaatcctctccctcctagccctctctcccctttgccctcaatccaaatagacatatgatcaggtcctggccccaggcataggatagatataaaagggaccttgtatctgagactgggagcccggagctccttggggaggatttctacttcccacggctcactaatcgggctctgggagtcacatgaggactcgtgacccctgggcccagatggtctttcatctcactgcagacgggacaagctccttgggacaaagcagcttcacactgcctgactccaggcagccccacagcaggctcacctcactctgcctgaaagccatcttcctgaaaatttgggtgatttgtgaattcataaattcaatccttctttattcctaatgattattgtcctttcaagggacatttgtccttggcttatatcctccagattgtatctccttaagttgcagggctcgctaatgtctattgagtgtttgtactatgctgagtgggattacatgtgagttatttcatttcatcctcataacaatcttgggatgtgagcaccgtttctatcctcactctaaagaccataaccatagccagcatttatacagcactatgtcacggacatcattctctgtgctttatgtttatcaactcaccctatcatcactgcagtcctacggtgtagatgccagtcatcccccattcactgagactgacaggttgagcaagtggcacaggtcacacaaccagcaaatcagaggctggaattcaagtctgggcaggatggctcccaaggctcctgaccattctgatacactgcctcctgtttttcccatagcatttccagggatgtcctagaaatggcaagggaagtcccacttgccatttcagaagccatggctaccattacaaatcaatagggtgtgagccagacaaggcctggctcagtcacatagtttcctgaggcgctgaaggacagaccacactgattgatttctcggctgggtctttaaatgtcagtgtgtgcgtgaccacatcagaccttgggtacagaaataaaatgcagaaggaaaggacattctagtgcgtgggatgagagggaagcagggcaggagaagagcaacagcctggagcacacgtgtgcaggctgggtgggcttcctgggctggcggaaggggccccatgtacccagtgggggatgggagtggggtgagacctacacccttgaccttggactcctgtgaagctgtttatggcctgacaccaaccctggagagatgggtcttaacctgatttagctcccttatcagtattgattggccactgttaggcgctgctcatttgggccagcctgactgcctgagcacagatcaacatccccagcgcagcatggcagggcaaaggcagtgccctccttcccaccccccagaattcacccaggcccccactgcacacttctctgggcctgcccagttcagtcattcactgttctaggatcggaggggacaggcacacgtgatggagacagagcaacctgcctactcccatgcagcccggaaggggagactgacagggtaaggaagccaacagaaatagactcaagacgaatctcagatgtgttgtgtgcaggaaaggaagaaaatgaggtaatgtgggagaacccgtagggaggggacaagggaaaggggaagatagtccaggagagcctctccaaggatgtgagtttctagcagaattctgagtgatgggaaaagggagcattctgagaattgaagaaagagctctccaggcagggggcacagcagaggcaaaggaccagtggcagaagcagccttggcctttcagacattgagtacagggagcagcagagtggtgggtggtgagaggagagaggaaggtggggaccagatggacccccaacccctgccaccctgtccctgtaggatggttcctttataagcagcccaggttcatcattaggacttgacattggtccacctctttttccccctcccacccacatccctggacatagctttcggttagcccctagccctcacagttgtggtaaaatatttcagagagtggcttggaatagtggctcatgcctgtaatcctagcactttgggaggctgaggaaggaggatcacttgagccaaggagttcaagaccagcctgggcaacatagggagactcgtttctacaaaaataatgaaaatattagccaggcatggtggtatgcacctgtggtcctagctactcaggagacaggtgggaggatcacttaagcccaggatgtggggctgcagtgagccgtgacagcgccactatactctggcctgggtgatacagcaggaccctgtcccccctcaaaaaaaaaaaaaaaagattccagagagaagacccttacccagtcatgccaaatccaatatgagaggttaaggaaggaccccagggaccacccaatcccaccatctgcctcctctagttctagctcatatcacatcccagctgaccactcactcatacacgtctgccctgggctccatctctgggcctctgctcctgctggtccaacattgattggcaatgtccttaccccacatctccatgtcgggaaatccctgtcatttgccagcataaatgattccaaattcttgagggctttcctgactcccagtcacattcaatcgcaggtttgacttgttttaatgctcctcaggcatttgtttgaacatccctttgatctttcatttccttttgtcctacaatgtagttttctgaatacccgtctctcccatcataccacaaagtctgtggagagcaagaattcaaatgctggttctgccatgtcctggctatgaggttttgacaaggcacttcacctttccagatcttaacttcctttgattcccacagaactgaccctgaaaccaggacatgatatctgaagtttattgggaggtgattccaggaagtgctggcaggcaaagtatgagatgagacaggagcaggaaagaacccctaatagggagtattattcatcaagtcaccacactgtgctattgaagttcaatactgctgggtaactttgggggactgcagaataccgtttcctaacccggctgaacgttgcactcatcagggagatttaaaaaatatgaatgcctgagttctatccacagagattctgacttaattggtctgggatataggctgggcaccagtatttttttttacacccccaggtgatcaaatgtgcaggaaagtttgaaatcactggtgtagaatacatctcaaagctgtcccagtcaagaggtgaaaaaccagggtgtttatccaccaactctcatccatctttggttgaggatgtttccagcgtattctgtgagtgtcctcgaatgctaccttgaccagaaaacaaaaagcaaaacaaaacaaaaaacccatagatgtttgcagtaagcagcctggggtatatgagggcgaatatgggaagtgtgttagtgtctgctatatccttcatctctaagatgggggtaataaatttgtgaatttttgcaaggattagcaaatgtcggctaagtgtctggcaggcacacaataggcagttactaaatgttgttattctggtttttgctgtgggttactgctgtattcccttaagcacccaaccgggggctttgtgcctagtggatgcccagcaagtatcagtcattctctaagtgctcctctaaaacaacaatgctggaaacctgaaatcagtggggctgacaagacacatcactcaatcctgtagttcttgagactctgaaaccatgtgtttccctaagtgatctgatatttttaaccttggctgcacactggaatcacctgaggacttgaaaagaaaatacaaacgcctgggtcccacccccagggattcctgatttaattggtctggagctaggtctgggcatttcggatttgtaacagttcccctggagattttaatgttgtagacttcatgattaaccaagggtggagggatgggtggggggttaggaaatgagcagggaaaggatagttgcataattcttccctctgttccatcccaatcctcctcccatccctccgctgtgtctcagggcttcagaaactcatttctagcaaagtggctggaggccctcacaggcataacccctgctgctccccgttccacagggcagccacaaaccaccatgcaggcaccttcttgctcgtctgacatgtgtcctcctccacatcctgcttgcccggccctagcacccacactggctcactctgcagaccctcactgagtgtctcccacacatcagacactaggtgaggcacagggacacagggatgctgcaatccttacagttcctgctctgagaggagaataatgcacagaaacctacatgttcagggctccagtggaagtctgcatccttgctgtgaagcaggggaggaaaatcatgttctcctgggcaagaaggagagtgcctggaaaggttttctagaagagcctcactgagataggtagaaataaacatcctattttttttttttttttttgagatggagtctcactgtgtcactcaggctggagagtggtagcatgatctcggctcactgcaacttctgcctcccaggttcaagtgattctcctgcctcagcctcccaagtagctgggactacaggcatgtgccaccacgcctggctaatttttgtatttttagtagagacggggtttcaccatgctggccaggctcgtcttgaactcctgactttgtgatccgcccgcctcagcctcccaaagtgctgggattacaggtgtgagccactgcacccggccaacatcccttttttatagatgagaaatttaagtcaccagggagagaggctgatgtcagagcctttgtgaagttccaggcagggtgctgggcactctacccatatcattaataacaataataatagcttgttcatttactgtgtgccagggcccttccaagtgctggttgaaccctcacaacactcctaggaagcagatgcaattatgaatatttccccattgcacagatgaggaaaccgaggcttgaggaggtgaagtgacttgcccaacatcacacaggagtagtggagccagaattgtagcccaggctgtttggctgctgaacctcttcccttgaccttgacattgacagcctcccatcattctgctcattctcataatccaatgaatgaaggaggcattagaaacgtgctgtttacaatcaaagacaataaagatcagcgaggccacagccacacagagggcaagctacaggcagtgagtccagtcctggcctgcctgattctgcaagccctccttggtgctttgctcccatggtccagcttcccttccatgcctccactctgtttgtgtagctgcaggttctcccaagtatttcctccccaactgaagaccaggcccaaggagcagaccctgccagccgtcagctgagccttgccgggtctgggctacagtggggcctcctttcccacaggcccctacaggaactcccacagtcatcaagtaggggcccactcagcgtagaactgacatcgccagccccacaaggctggtgcctattggcagggcccaaggatggcttgatgtttctgctggggtgtcttgccgtgtccccgttttcatcatatttttaaccgggggtgtgggggcgccaggaagtctgtgatttgctggggtgagcacagcccggcctgtatccagcatccaacatctccttggtacccagctgggcagatacatcaggactctaccctctctcccctccctgagccttgtccctttgagaaagcccaggaaggcagctctgcacgctgagaaaacacttgctaacctaagggcttgtaatgaaccaaattctgctgaattaattggatgtcgctagcagtgtcaggaagggggttggggagcagtggcatccaccaagcctggggatgggaaaggcgggggcaggacagcccacaacacaaaatacttctgcacagcttgtgcaagagaagaattcctcattgtcagctcttgccaaaatagccaaggcacccactctcgcctcagacagcacctcttttctgaaactggactcccagcctgcagctttgaacttgggcctccaggtgcatctgttcttgttcacaggagccatagcacagccttgatgataagaatgagcctgaaccagcccccaccgagcttcagggtcaaattacaaaggcatcgggaggctctatctcttggctgtacatccaacttcctgccttgatggagcaggcaagtaaagaaccccatgctggtaatcacatctagttaagtgtctggagggactcagtgtgtgtggtcatcagctggtctccgcacagagggggcgcagagacaagagcagagacaagagcaactgctggagggacctgagcccagaagtcttttttttttctttctttttttgagacagagtctcactctgttccaggctggaatgcagtggtgtgatctcggcttactgcaacctctgcctcccaggctccagtgatcctcccatctcagcctcccaagcagctgggactacaggcatgcgccaccatgcctggctaatttttgcattttttgtagaaacagttttccccatattgcctaggctggtctcaaactcctgggctcaagtgatcctccccccttggccttcaaaggtggttgggattgcagatgtgagccaacgtgcccagcctggaagtcttatcctagctttgctgtaagtgggctgtgtgaccctggataagtcactcctctctctgagccacagtgtcttcaactgagggataagagttggaatgatcagttcatcttaatctgtgcatctcagacactgggaaaaggcaggggtcttaagggcattgctaaggtttagaaactttgcatgcactgtacactgtgtgtgggtgaggaaaaaatagctctcatgctcacatacactactatttttcaaatgaacatagaattgattgtttttaataaaataaacatttgtttttaaagcagtcactgaattcacaggaattttggtcttttttttaatgatactttatcttttttattttttattgtggcaaaatatacataacataaaattgaccattttcaccatttttataagtgtacagctctggggcagtaagtacattgacattgttgtgcaagcatcaccaccatccatctctgggagcttttcatcaccccaaatggaaactccatacccattatacggtaactcccattccttccttccccacccgccggccctggtaaccactaatcaatgttttctcaatcaaaagacactaaaaatgcaacaactctctcacacggggtccatggaataacttgatgttgagaagaagtcctacttcccaaaaaggtaagacatccctgacctagaggtgctaagccccttcccgaactgacattgaatgattctacttttctaatggcaggaaggaaaaatcaagctgttaattttttttcctggaatgaagatgaatttaatttttttttccttttcattcaagatgggtacctggaggtagaatctacaaaaaaaacttggaaatgtcagagttgtggtttcctctaaggggctggaaatagcacgaagaggcttgtagggagcaggaatgttctagatcttgatcttccagtggtcacatggtatgttcctatggaaaaaattatcaagctggctaggtgcagtggctgtgcctgtaatcccagcactttaggaggccaaggcaggaagattgcttgagcccaggagttcaagaccagcctgggcaacatagtgagaccctgtctctataaaaactttaaaaattagctgagtatggtggcccacacctgtagtcctagctactcaggaggctgaggtgagcagatcactgtgaacccaggagttagaggcttcagtaagctacgatcgcaccattgtactccagcctgggtgatagagtgagaccctgtctcttaaaaaaaaaaaaagaaaagaaaaattatccagctgtttacttcagatttatgcactttgttggatgcatattatacctgctgtgacaccattttttaagtggagtgagtcattcagttcaaatgggtgcagataacaacatcacagtcagggaagggtctcacctttcccctgccagtttgttatgtaaagcaaggcagaatctgttctgtcctgaaataaggccaggtaatgcaccatttgtttattcatttgtttaagaaaacatgtggaatgtcttctatgagccaggtcctatgcaatgccctgggaatagagagaaggtcccggacctcacagagctgtatcagccgtcactctcactcatccacctacaacatgcatggtcaagttcattttcacctcacctaaacaagtcctgctgaaatctaagctcatttcctgtcgctactttctcagcagaggtcatcttaaagactctgagatcatactgtgaaactccggccagatgatcattagcagggagtaatcctctttgtctggcaaaaccacctcgattcttttatatacctgcccatcttcaaaccctctggtcagtgttggttaacactaacaatgtgctactacaatttacctgtttatgtttctctaagctagaacttcttgaggacaaacgcttgctttatttttattattattattattattagagacagggtctcattctgttgcccaagctagtgtgcagtggagcaatcacagctcactgcagcctcgatttcccgggctcaagcaaacctcccacctcaggctcttgagtagctgggaccacaggcatgtgccaccatgcctggctaattttttaattttttgtagagatgggggtctccctatgttgcccaggctggtcgtgaattcctgggctcaagcagtcctcctgcctcagcctcccaaagcgctgggattccaggtgtgagccactgtgcccagcctgtattaatttttgtactaattatatttattgaacatcaaataggtgcatagaacagtgcctggcacatggtaggtcctcatgaagttgactgaatgaataagcaagtttataagtgaataaatggatggaacaacaataagcccagagtagctaaatcacaggctgaaggtcacacagcaatggctggactgggagggacacctgtccccagacttaggcctgcccctcttcccttggcaggcaacagccacactataaaactttccatctattcctttgaagaggtgggtttgatttatatcagccatcaggcagcaaaaatatgggccttcaaacttttattgcctttttattattcctggtgacgcacagaaatatcatccaaaacattagcaattactttgaaggtgcgtgtttcaaaggcttggggatggggtgttttctaatttgataagtcagggtgttttctgccaggcaggcccaggggcatcggcaggactggagctgattcaaaggcagaattgatctttcaagcctcattttcatttccattagcaccctatcagacaccttatccctgagccagttcctatccatgtataatttatacatttgatttcaatagattaatctctgcctctttcacaggagagtacagcagagacggttctctctctcgttttccatagggagagtaatcatatatatttccatagatctcaatccgtttccacctagagaatttcttttaagattaattccaaactcactgtcatatttatttagtttttaggactgggtggaactgtgggtacgtgtgataatttctgtttatgtaggaggtgggcttattccaggcataccagggaggagaccagcctatctcctcctggtgcttaggaatggccatccactttgggggtgaaacagggatgtagggagaagactaaagccaccctcccctggagctagggtcagcgcccactgacctctgacccaagtgtagccctccatcccctgagctccagggcttctggaagaacaccagaatagcacaagacaaagataagatactctttccaaaacctaccacatttccacaatccaaggctctcttatttctccctttctccatttttcttcccagtgccctctggattccagagtccaattttggaatcacagttttcagaactctcttgggcggggcactgtgtgtagctcaaacctgtaatcccagcactctggaaggctaaggtggaaggatcacttgaacctaggagttcagaaccatcctgggcaacatagtgagaccccatctctacaaaaaaatttaaaaaattagccaggcacagtggattgcttctgtagtcccagctactcaggaggctgaggcaggaggattacctgagcccaggagtttaacgcttcagtgagctatgatggtgccactgcactccagcctgggtgacagagtgagaccctatctcaaataaataaataaattaaaaaatattaagtacataactttttagaaaatacaaattgcctatctgatttggtgtagttgacaaattaaaaaaaaaaatacaagccaggcacagtggctcatgcccataaccccatactttgggagattgaggcaggggatcacttgaagccaggagtttaagaccggtccgggcaacaaagtgagacccccatctctataaaaaaattttttttaaattagccagtcacagtggcatgcacctgtagtcccagcttctcaggaggctgagtcaggaggatagcttgagcccaagagttcaaggctgcagtaagctataatcatgccactgtaccactccagctatttgggaggctgaggcaggaggatcatttatttgagctcaggagtttgaggctgcagtgggctatgatggtatcactgcactccaacctgggcaacagagcgagaccccgtcccaaaaaaagaagaaaaaagaactaccttggcagtgattgaactccctctccccattccttatagccaaagcctcttctcaagaaccctgtgtttctctgtttatgggcaatttcaccccctgagagtcaagccacaagccttcctgctggaagttcttcctggttgggcagcatggcagattgtattttccaagatggctgcaaaaagatatcccatcccacaggtccttacaacgtgacactgataattctccgattgagaaatggggtctacatttcctccagttgaatctaggcagacttgtggctatggcagaagtaacgtttttgctcctgcatgcttattttagaactcttgttcttggagcccagctgccatgctgtaaggaaatccagaccacacagagaggctacatgtaagtgtctgggcaacagccgcgactaaggtgcttgcaaacagccaacatcaatgtcagtcatgtgaatgaggaaacctttggaatgactccagctccagcaaacatctgattctaacaaagaccaagagatcatgagcaagaatcacttagtgaacccctacagaaccatgagagataataatagaatgattattgttgtcattgttgtttttgagacagggtcttgctctgtcgcccaggttggagtgcagtgatgcaatcatggctcactgcagcctgaacttccccggctccagtgatcctcccacctcagcctcccaagtagctgagactacaagcacatgccacaacacggctgatatttttgttttttgcagagatggggtctcactctgttgctctggctggtcttgaactcctgggctcaagtgatcctcttgccttagcctcccaaagtgctgggattataggcatgagccactgtgcctggcctgattgttattgctttaagctgctaattttgggggtgcttcattttgcatcaatagatactgaaacaggcatggttagcagagcaattggagataaaagtgagcctctggcagcttccccctctccagcttaaaagacatcccacatttatacaaaatcacatgcaaatgagtactgagagcctcaggtcctccctccctcagcaaacatttggaaaggagaagatgggaaaggaagagagacaatattcattgcatgcctgtcatataccaagtaggtgtcttctaacccattatacagctaaagaaactgaagtccagggaagttaagtaacttaaccaagcccatactgctagcaagtgtgctgtctgtgaagtggggcctgcataagtcgcccatggactgagacacatgtggagggaagcggtgctcaataagtattagtggaatgaatgaaaaaataaatgaatgcacacccccagtcttctctttgtagcctttctttttccagtggctcagagggagaacccacccagtttgcttttctcatgaagggcaagaggaggaaggaggtggctgttggctgagtccaagaccccctgttgctgggctcctgcagatagggtggccttctctgccagctgggagttgccattctgttgtttctctccagtcatgggctcagggctacctcctctggtctcagtcctctttcgggtgcagctccccgcctgagcttcaggcccatctcagcccatctttcctgcatgtgcagcctctggtgtcagttcctggggcagaatcaatgccagagtgattgccaccacagaaaggtagccaggcagggccagcagctccttcttgcacccttgtcctctccaagcacaactgggatcagaaataaccttctcccttgccaaggcatttgaggaggactgcaggccctgcagctataatgtctttctcttgttcttttttttttttttttaacccagcaaatcatattttcccaggaaagaaggagaagaaagcaagcatggagaggggaggaatttacaccaaccaaacaccttccacatcccaggcactgttaatgtgtattcattatctcatttaatcctcctaataatgctgtgaggtacatattattattatccctgttttacagatgaggacacggagactcagagagggtaagacagtttctcaaagttacacagagtaactaatgggagttagggtgaggtttcaagcccagccgagcctgtatggctctaaagccaatgctgttttcactataagctttttcctttttctctttcctaggaagcagaatcctcttgcccctggagcctatggggccatcacagggccaggaggtaacctgatctccatcacccaagtatcatgcacggagctggggcaaaactctgtcaaagatcacaaacaaattactcagtcaaatgtatccgagccacctctggttcctcacttttgtgtacaagacaattgaacttctgatatttggttctggcccactcagcacttcagagccttcagccgaccataaccctgcctcccagagcttagatcaagccaaataaggagctctactcctttcccatatatctgacctagcccatcactgaattccatttctgctaaataccgtgatagcacagtgggtcagcacccaagttctggagctacactacctgggttcaaattctggttcttaatactaataggacctctagcaagttattcgacctgtgccttggcttagttttcccacgtgcaaaatggggttaataaaaacacccaacaaataaagttgcaaggactcagtgaattagtacgcagaagggctcatcatattgtaagttggctattggtgctatttctggtttgatctaaacactctccacacccagaaagaacacatcccagggcttgcagcagctcacactgcagaccacactaaacagccctcccaacccctcttctcacctatcacctctcagagaaccagctagagactggcctggaagccgttcaacatagacaaggatgctctttgaagctggctgggtatggccttaaataactcacaagccagctacctcctctgttttccctcatgccgcacaaatggcttcactaacttcaggcctcactttgaaccctcacatcatttcctgacattgctggtgcctggcctggaggcagcaccttacacagtaaggaaaagcagctgctcattacctcgcctccccacctccattaggataaaaatcacctcccaagatgggactctacagccagagggtgaattggtgacctcattgctcggctcactaggttccaggcatccctaaatgccagtgatctttcctttccctctgatgtgtcgatgccagcctttcagtggccaggatccctcccctggcccccagcctggttgtagaaccaccctggcgtgtcaaaggactctggattccaaatggcatgtttagaagtgtgtttactgcctgtgttcgtggttttctaccatcaggacaccgactgttgaaagcaaagttcaagccaggttggtgcaagttgcagaagcagaaaaaggattctacgctacgcctctctccttccttcaactcagctatcctggacgcactaatgtaatgccattgtgttagtctgtttgggtggctataacaaaataccacagactgcgtggcttataagcaacagaaatgtctttcccacagttttggaatctgggaagtatgagatcaaggtgccagcagattcagtctctggtaagggcctgcttcctggttcacagatggcagcttctcactgtgtcctcacatggtggaaggggcaggggttctctctcaggcctcttttataagggcacaaatcccattcataagggctccaccccagtgaccttatcactcctcaaaagtcccacctcctaataacatcaccttgggggccaggatatcaaaatagaaattttagaggaacacaaacattgagacaatagcactccatttatccacctgtccacttgtccatgttcactgtgcacagcatttcctggcccctcctctccactgacatatctttgtttctatatcagaattttttaaaaagacattcagtaagcttctgatttgaagcaggccatgtgctgtttggtatgtattgtctcaattactcctcacaaataccttgggaggtaggtattttatatatatatattttatgttttaaaaattttatttattcattcatttatttatttgagactgagtctcgctctgtcgcccaggctggagtgcagtggtgtgatctcggctcactgcaacctccacctcctgggttcaagccattctcctgcctcagcctcctgagtagctgggaccacaggcacccaccaccatgcctggctaatgtttgtatttttagtagagacggggtttcgccacgttgaacaggctggtcttaaactcctgaccttgtgatccacccacctcagcctcccaaagtactgaattacaaacatgaatcactgtgccctgccacgtatatattttaacatagggtcttgctctgttacccaggctgaagtgtattggcactaacacagctcactgcagcctccacctccccagctcaagagatcctcctgcctcagcctcctgagtagctgagactacaggtgtgcactaccatgcctggttactttttttttttttttttttttgtgcagagatgggttctccctatgttgcccaggctggaatactattattaaccccattttatagacccagaaactgagcctcagaatggttatgaaacttacctggattccacatccaatgaacagccacactgggatttagatgaggtctagcgaactttagaacccagttttgttttgttttttttttgagacggagtttcgttcttgtgcccaggctggagtgcaatggcgcaacctcggctcaccgcaacctccgcctcccaggtttaagtgattctcctgcctcagcctcctgagtagctgggattacaggtatgcgccaccacacctggctaattttgtatttttagtagagatggggtttctccatgttggttaggctggtctcgaactcctgacctcaggtgatccacctgcctcagcctcccaaagtgcggggattactaagaactaagtcttgttttttgtgtgttttgatttgatttgatttgatttgggttttgtagaggcaagatctccctatgttgctgaagctagtactgaattcctggactcaagcaatcctcctgcctcggtgaggtcttattttaataacagcaggtctgggtccctaaaggactctctgtgacatatgcagtgattggtgttgcaagaaacaccaaaggtaaaggcttagagtagccccatgaatagccagattcaaactccaacatcctggtaccaggatctgagcactcaacctggtcacataaactcggcatgcaagagagaatcagacagtgtttcccaaagtgtgttctatggaaccctccccccaaccttcttttgttacaccaaaagaagggttccacagtccaacaggtttgggaaacattatatattctgattcctatctaaagatttataacactcgttagcaatttttttttttttttttgagatggagtctcactgtcgcccaggctggaatgcagtggcgtgatctcggctcaccgcaagctccgcttcccgggttcacaccattctcctgcctcagcctcccgtgtagctgggactacaggcacccacaaccacacccggctaatttttttgtatttttagtagagacgggatttcaccgtgttagccaggatggtcttgatctcctgacctcgtgatctgcctgtctcggcctcccaaagtgtggttagcacatttttagtatgaggattttaagtatctttcagtaaagagatctgtttgcctttatctatatcaatgtttctccagtttatataatccctgaacccttttatcctttttagtttccgtggagtcaatgttctgtggaatagagtttgggaaacactgttttggtatctctacccttgcctgaattgggccaggtgtgtctgcagatcaccagcctgccagctataaccacccactccataggtggtaccaacaaggtcagcagcatgcagcttgggcccatggatcagagattacactcctattactggcaggggcccatctaacccctggagcctgcagccaactgccaacccagcccaaagctgacctcgcttgacttgattccttatcttcaggcactctctgcctccctgggctcccatcagaacagcccagaaagctgcacgcctgcttcctgccagagaggacatgctagatagagagagctggggtgacaagcccagctggaaagcaaagtacttcccaaagcagcacttagcagggccatgtgctggggaatcagcctttgcttgagcagaggcatccaacagcttgcaaggcaaagaaacaaacagctcccaagcacaaaacgccttcacaaatgtacggcgtgtgaaagaacccacctgtctctctgccaccccacccacccaggtaacacccaaagcagcagcagcaactgcggccgcctccacccgcaacagccaaagtcatgtgaatgccaagagcctttgcttgtcagctcctaaggacatttggcctagcacaaagcccaggacaagagatcaagaaatagttatggatgcaaggggcctaggacagggtgaggtggatgtggaagtgcctgtgaaatcaatacagccttctacttcctcttgaaatttgctttctcgagcctctttttaaaggacctggtattgtccttgactaaggatcctgtatgcacaaaggtatctaaaaccacggccagcctaaggcattgctgattgagtccacatgtgtgtatattttattgttgggtacatataggtttatgtgaatggggggagtcgaaaacacaggaaaaaccaaaatgcaaggggtattagacagcattgcctgaaaaagacactcattttccatgattgatgatcaaggttggtatcaatgactgcttgcgtttcccatctccactgcacccctgaatagatgccccttaccatgaaatttatagccctttgcttgaaatgctatactctacagtaagctaggaccaaaataataactagagggcaaagcaattaaccatttccccaggctgaagtttcatcctcttactgccttgataatttactctgcaaagtggcaggcacctggctcagagtcactctccaaatctattcaaaagtccctgaattctgctgagtttggtttcactgtatgaacaggaccaaaaacaataaggtctttgacaccttattataattatattataatactaagttgtattataattataacacaacttagttttcctccaaagcttccatttgctgggatgctaggagacagcatgagcagttttactgttttcatggaagcctttgggggagcggaccaaaaattacatcactgtgtgccattccttcgccaccacatcttcctatttccacagagatcttggggctctcaggcccccagcctcagggttctcatggaaaagttgtggccattctgaactttcaggggaaatacaagaaatgggaacaccaagacaaaaggcagccaaaattatatcacaatctgtccaattctgaacctatgatcttatcatctgctctgacctctcctcgcccccaactgcatctcctcctgtctcctattcagtgaatggttccaccatctgccactggctcaagtcacaaatatgggggttatctgggacttacccatttccctcatcaccacccccatgccgtattcaatcagtctcttaagctctgtcaccctcttttctccagcttcactgccatcacttttgttcagaccaccgtcttctttcccctggttgaacaagagcctaagtgtctcccttgcttttagtcttgctcccctctgtctattctccacactacggtgccacaatgacctttctgaaaaacaaatagaatcatgtcactgctgtacttaaaacccctcagaaaccacttgtgttcaccaggataaaattctaaccccaaccttggtacccaaggtctttcatgttggctcccaggccacctcccccagcctcttttctcaccactctccccttctcttaccaaatactaaactactactagttctcaggacacgccatgctctttcatgcctctagtccttgcacatactatttccacattctggaacaatttttcatcttctttctcctggctaagtcctacgcattctccaagaatcagctaatgcatatcttcctctagaaaactttctgaagaggcaaaaagcccctcctgcctccttactgtccccaagctcttgcataaaaacatgctgttccttctgtcttattcttatccttcttaaatgtggcaggaggtgaagcagactcctgagcaattcctaacccatagcacctgagggactatctccctagcctccctttcctctttcctaacagaaccccaatgtcttcggatatccaccctcacccaaatagccccatgcctcagggaaagctgaccttgccacactgattgggctgggggaaggggaatatatatctcatttttcttcacaatgattggctcaagaatgtcatgtgacccaattctggccaatgagttatgacatttcttgtctcttaagagagagtcactggaggagaccaggtgtggtgagtagatcatgccggtaatctcagcactttgggaggccgaggcaggagaattgcttgagcctaggagttcaagaccagcctgggcaacaaggcaaaacaccatcacaacaaaattaaaaaattagccaggtgtggtgacacacacctctggtcccaactactcggaagactgaggtaggaggatcgcttgagcccaggaggttgaggctgcaatgagccaagatccacatcactgcactccagccacctgggtgacacagtgagaccctgtctcaaaaaaaaaaaaaaaaaaagaaggccgggtgtggtggctcatgcctatgatcccagcgctttgggaggctgaggtcaggagtttgagaccagactgaccaacctggagaaagcccatttctactaaaaatacaaaattagctgggcgtggtcgtgcatgtctgtagtcccagctacttgggaggctgaggcaggagaattgcttgaacccaggaggcggaggttgcagtgagctgagatcgtgccattgcactccagcctgggcagcaagagcaaaactccttctcaaaaaaaaaaaaaaaaaaaaaaaaaagagagagtcactgcaggagatggcctgtcttcttcctctacatcaagaattcttagcctttttttggtgggggggtggtgccaggatcccttttgtggtaagatgaattccgtgaactgcttcttagaataatattttaaaatatataaaataaattacatgtaaacaattataatttaaccacgtattaaaatattaaaacaatatatttgtggtgtaataatatatgtgatactttattaacacattcaatatcaatatttaatggcaggtctaataactactacaatttcaaagtgggattgagtataaatgatattttatgatatatttgtaattgtaatgttatatgaaaatacatatgatttcttttggtggcaaagccacagtacactactaccactatagatgttgcctgcatccataattgaagaaaatgccacatttcagttagaggttagtggtgtaattctttctcccactcaggttcgtggctctccgggtttgtctgtggagcccaggtaagagctccctgctctggactttgtactctctggctgtgatggctggaaccactgcagccatcttgccagcaactggagggtggaccactatggcgttggcataccggaaagatgaaaagaacctgggtccttgataccattgctgggcctctaaaccaaccagccccaaagcctattgacttcagttatggaaaataataaaatgacttattgtttaagcccatttgacccaggatttctatggattcagctaatttacagagaaggaagaaggtttaactttatgtcagagtcagtgtcaaaagacagaacaaatggagcacctacaccgagctcacaatccaagtagaaagcccctttcctgacggaaagcaatttaaactgcctctgctatattcacagtgcaggagaataccgattgcacaaagacaacgtatgctctgagccctggagtcagtgagacttctgggagcacctgtaccttaccatcatcttgcaagcgcattggatggaggtgaacccttgcacaaggacagattgatgaaaactctttcctaaccactgtactttgagcacacctggaagcagtaacaagcattctgaacatgaaagcttacactctattgcccacagcatggggcaagaacaatgtgggatacatccaaaagcagtgctgctcaaactatagtcctcagaaaggaacatcaaacctgatgatgcgtctgaaacaggcaccagaaacatcaggaacagattgctgggccctatcctcagaggttctgattcagcaggttggcagcaagccctaaaatgtgcatttccaaaaaaacttagtgttatgatgaggtttttggtccaaggatcacactttaagaagcactgtcctagaggatccacagaggcccagaatgactccctcagccacatggctaatcatatcacttaaggaataggatctggctttacaaatttattaggagtctggtgcagaggctggtgcctataatcccagctactcaagagttcgagatgagcctgggcaacatagagagaccctgccccccagctcttaaaaaacaaagttcattaggtattagtaggctgaaaaattgatctggttatctagttctctttgccaagtttgttttgagccaggcacaactctgcttgacagtggagtgctggagctagctgataccagctcgaaagagctaattgttaaattttcaggaattttgcaagctggttattatacacagccatcattacaaattaattatatacacttttaacaaaataaattacattaaaaacaaagatacttagtactcctcacttcctaattattttactatattttattatcatctctgctcttaaggttatttacatctactgtatgtatgtgatgaaaagattatatgatggtgtatctcctcttccccactctacattcgatgactcaccactggtaggttggaatcagccacggtggaatttacaccatggaaattgttgattgtattgatttcagataatgatggagaaaatgttaatactgcagattaaacttaaaatcatgttgtgtctgtaactgttacactgtgactagtaccaaaaaatcaaggcaatattcttccagcattcaaatactaccacctgattcagcaaagaagtcactatgtcattgactaacaaatgaaattctgatacacgtttgttgtttttctttcatttgactccttaatggaaatgaaactatcaactgacattcctgttggaattatcctcatttgttaatgatgtgagttcttctttggcaaattggatagcattgattcatagtctgattttgtcaaatcatggttgaattgaaaccatagttatggctggggaaacaagatttcaacaaaggtcaacaaaagcactgtgagaatcagttggctgtgtgaaatttacaataaagcattgtatagtttactcttctttgtaatttgggtgcttcacatctgtattagtcagatcagacggccataacgaaatattataccatggattgggtagcttaaacaagaaaaagttattttctcacaattctggagaccagaagtccaagatcaaggtttcagccaatttggtttgtggtgagggttctcttcccagctggtagatgggccgctttctcttttgtcctcaagtagcctttcctcagtgtgcatacgcttgcacatgggcagagagacccagctctctggagtctctccttataaggacactaatcctttcagattagggcctcacccttataaccttatttaaccttaattacttccttaaagtcctcatctctgaatatagccacatcgggggatagggcttcaacataagaattggttgagggggcagcagatacaaacattcagtcaatagcaacatcctttctctctgtaaaatatctaaaaatttataataaacaaatgatacaaaagttataataaacatttttttctggagagccagttttaaaatattaatgatcaccatcttttagtcatctttattttctggacagggtaggtcctagctgattattagggggaggattccattgcccagagtgagcaaaactggatgagcaactccctggcagaattctgtcttaccaggctgattttgttcgaatgtgctgcctgtaacaatagtatctttcccacgcttgtaattcgtcctcctgcgagtagcttggtgtacttccctaggcagagagttgtcctgaaagtggccaaacttgctgacccagggccacaccaaccctcccaattgctcacagtctgtccctctttccttacaagtttaccagggcacgaaaagcaggcaacttcctactgaatctctccaccagaacaggactggggaagggacctccctttctcatcagaggtccaaggcagcagtacagcatgctaatacccagaggcaggcagtgctacagttgggcagtctggtcagtggtgacagtgcaggccacacaaggccttgagttggaggagcagagggtctttccagagcagtggagatgatgtaggactggacttattcacaaactcgatgactctcagatatgctggagaggagagatcaagtcctgcagttgctcaggtagggctatccagcagcaactttctgatctaactatttatgagatctcatttgcacctcatttgtcaagcttcaccttcattctgcagatgagaaagctcattttaggagaggagatgactcagccaaagaggtcacatggtgaatcagggtccagtggtgtggatgtgtctgtttcattcagcctctgctctgggcaagctttctcctttaaatgagcagaggaagcatcagctccgtgcatagaaacatgcagagccagctggcatgtctgcgaatctgcatctgtgcttctcccagacctttcaaaggttctggggatgagagtgcagggtgaaggcactccagaaggactatgctggtaacttgcccaatggcccactgtcatcgccttgactcatcacccacctgtttcatttgtctctgtctgggagcttaactagagtccaagttcctataggcagggaacatgatatgcatgggctcctgagccagaactgtgttcaaatattgatgctgccacttactagctatgccactgggcaagtccattaaatggaaaaggaaagatgcaaaaattcgttgagggccaggatgtggtagctcacacctgtaatcacagtgctttgcgaggccaaggattggcctcccagattgaattccagattgctgaggccaggagttcaagacaagtcctgcaatatagcaagacctgtctctacaaagaataaacaaaaaattagctgtgcatggtggcacgtgcctgtaatctcagctgcttgggaggctgaggcaggaggatcccttgagcccaagagtttgaggttacagtgagccatgactgcaccactgcactccagcctgggtgacagagcaagaccctgtctctaaaaaaaaattttgtaacataatgaatgccttttataagttaggatttgttttacttgtaaatgactgaaacccaactcaaacaggattaagcaaaaaaaaaaaaaaaacagtttatcgtttcagcaatcaaatgatcctggaatagaccttataggcttctggtgaggcttgagaccttgtagacttccagggggctgagcaatgtcctcaggacccatttttgctctctccatctctagcctccactttttcggtgttggctccattgtgggctttctactcagggtagaaaggtggctgcctaatctccagttgtgtatacatgtgctgcatataccaactgtcaagctcccatccactggtaaggaaaaccagtctcttcccccaaaacactcacacaaatcctaggcttcactttggaccaatctaggtcatgagttgcacccctgaaccaacggctgtggctaggggaatccagagcactggtcagccacgcttgagtcacttgctcaccccctggagtgaaaatgaagcctggtccagagctcacaaactacaaatgcggtatggagaggtttcacaaagaaaaagaaagaaactattactgaaataaggtacaatggattctgggtagccaaaaagacaacaaatgtctgccacacctactatctaccatgctcctggtacttttttttttcattaaactcttgcaatggtataacttaacctttcagaatcacagtttcccctttttaaaatgaagataatgatacctaataagactagctactacttatctggtactttctaggcactgggctaaatgctttatgtattccaactcatgtaattatttatatcataagattattgttggaaataaattaaaatagatgacataaaatgtcctaggcataatacctgatacataataggtgataaatgtttaaatgcattttattttatcagtcactcaagcacagtattaagcacctaacagatgcttattttaaaagatgaacaaattaatctatgtatgaaattatttctgcatttacttatttatactctacctagttgcacaaaggatttgatatacaggatatgcattcgataatatagcacaatataaacaggtaaataaaatcaggaccaaggaatgtgtgaattagaatagaataataagataaggggaaaaataaaatgcattaatggatgtcatggatttagtttttgaatttgaggcttcgagtttcctggcaaccaaagagaaaagggaaaacccgttggctgcaataccacagttcaagaatgcaaaataaaatcattcctccaggaagataatttaatgcattggcttttgagataaaggaattcttgttgggcagttggggtagtggggacagggacagatactgaaaaactgtatttgaggtaaaaacagtagttttttttagcacaggaagtaattggcaaaaaagcacctaatcttttgtggggcaaatgcctgatgtacttttgataacagaatgaggtgccactttaggcctctgatacaacaatcaaatcccttgaggtgaaatgcctcccacagccttgggggggatttccctccaacagacgccatattcagaggggaggcaggaagctagtctccagaaagaagcataccctgcagacctgacttccattctcaagaagagacccaggagctgttctccctgaggcctaaggaggagaaaccaagggggttttcacctggcagctcccctaggcaggataactcttctcagctccaaggtccctgcctgcagccgagaaagagttaattgcagtgacccaaatctgcagtcccattttcagcatgctgaaaattactttttaatcctggcttttagggcttgcctggggagccatctgctgcaccctcccccacctcgggcacacaggattactcccacctgcccgcctaacttgcttttgtggggcctaattctgctcctgcccttccagatcatagtaatttggaggatgacagtttcatttgtggcgtaggaagagagcaaagattttaaaacaacaaaaagcaaggtcttccagcccagattaaatagaaaacaatttgaaaggtcagaatccacagaggtacaggtctgggataatcagacccccagcctcagccatgccatgccatctgttgcaggcatctggggctgggcaatgtagcacttggttttattctgggttccaatacttaggggtcatagggttccaaaagtgggtgatgcacccatgactcagcttgctccatccaaggaaattgagcagaagtccctaaactcccactggaacaagacctagagattatgccctagtctctcagtccttcagcacctctctagaccagtttagggaagccccctactgtgtgccttggtctgcaccctcaaggacctaactgtgcaatggaggagagatgagtcataaagagtacccagtgggatatatgctacgatggggcctttgacctgagccttgaagaataagcattcaccagatagacaaggtgagacaggaccttctagagaaagggaattgcatggacagaagccagagatgggatggtgcttctgaggagggtacaggaaaaaagggtctcacctacatggctggtggaagttatcagttccatgggtacaacctctgagaagccaatctagcaataatctttgaaattacaaacatacatatcctttcacccagaaattccgcttccaagaattcaactagcagatatactcccacgtatgcaaaatggcatgcttacaagttattcaatgcagcattgtttgcaatagcaaaaggttgaaaatgacctacacgtccaccaacaggctggtcaaatgaattctaggacattcatacaaagaatactctgcaacgggaaaaagaataaagtagttctttatgttctggtaggaaatcatctctaagagtgttgttcgtgataaaaagcaagggaagtaaccaaatgcaatgtgtggaccttacttgaattttgattcaaacaaaacagcatttgttgagagagaaaaaaaatcaaggaaatctgaatgctgactaggtagcttatggtattaaagaattattgttttcttttacatgtgtagaggttgtgttttttctcaggtaattttcttttagaaatatatgctgaagaattaatagatgaaattatatgatgcctgggatttgatttaaaataatcagggggagagggagaggaagtgaagatacaaaaagattggccgagtgtggatcattgttgaagtgggttgatggctatatggggggttcacactgttttttctacttttgtgtatgtgtgaaattttcctgcaataaaagcttcttagaaagcaaggtgcagactggtgtatttaatatgctgccaccaaaactaaaaagagaagactggccgggcacgttgcctcatgcctgtaatccagcactttgggaggctgaggtgggcggatcacgaggtcaggagttcgagaccagcctagccaatatggtgaaactctgtctctactaaaaatacaaacattagtcggtcgtggtggtgtgcgcctgtagtcccagctacccaggaggctgaggcagaagaaccacttgaacctgggaggcagagtttgcaatgagccaagatcacgccactgcaccccaggctgggcaacagagtgagactctgtctcaaaaaaaaaaaaaaaaaaagaagagcagaccctcaccaaacaagtgtatatatatatatgtgtgtgtgtgtgtatatatatatatatatgtatatatatgtgtgtgtatatatatatgtgtgtatatatatgtgtatgtatatatgtatatatatgtgtatatatgtatatatatatgtatatatagagagagagtgtgtgtgtgtatatataatgtatataatatatatatacattacgtatatatggtatatgtatgtatatagatatattgtgcatgcatgtgtgtgtgtatgtgtgcgtgtgtgtatgttgaatgaatgaatgtcctcctgggacctatcaggctatctttaggaatacagttagtttaaaaaataagtattacataatgtgaaaaatgtgggaatacaaaggaggaaatgaatcatctttaagggggagaggggctggttgaggaatgttgctggagaggagatgacgtctgagccgcatcctgaagggtgtcaaggagcttggcaggtgaggagtgtgagttaggagtcaagcattttgtactgaggaaaaaacaagagcaaaggtcagaaaatttaaagaatagagtatgtttaactaaagacactgcttttgtattattatcaaatcatactattgtcttatatggagaactttagccacgcctcttcaattcaattcaaagggatttatacatccacacatacaaaaacagtaggaacaatatacttgcctatttgcttatatacttataacaaatctctggaagaaaacatgcagctgctaaaactgtttgcctccaggagggtagactagtggctgggggacaagagtaggaaggagattttttactgttttattttttgtatcttttgaatttggacccaagtaaatatattatcttaaacaaacaaacaaaaaaggccaggtgcaattgctcatgcctgtaatcccaacactttgagaggctgaggcaggcggatcacttgaggccaggagtttgagaccagcctggccaacatggcaaaaccccatctctactaaaaatacaaaaattagctgggcatagcagcatgcacctgtaatcccaggtacttgggaaactgaggcaggagaatcacttgaaccaggaggtggaggttgcagtgagcagagatcacatcactgcactcctgcctgggcaacagagtgagactgtctcagaagaagaggaaggagaaggagaaggagaaggagaagaagaggaagaggaagaagaagaagaagaagaaggagaaggagaaggagaaggagaaggagaaggaggagaaggagaaggagaagaaggaggaggaggaggaggaggaggaggaggggaggaagaggaagaggaagaggaggaggaaattaaacagagtgagactatctcaatagaataagaagagaaagaagaagaagaacaaattaagcagagtgagactgtctcaatagaacaagaggaagaagaagaagaggaagaagaagaagaaggaggagacagaaggaggaggaggaggaaactaaaattaaacagagcaagactatctcaatagaagaggaagaagaagaagaagaagcagctaaaattaaaaaaaaaataagatttggaattacagagaacaagcctgagtagcttgggtaagttatttaccttctatgtctatgaatttcttttcctatccatggaatggggacaatgacattagtatcacctcataggagtgctgtggtattaagtgaaataatgtactagataaatgtattaaataatgtatttaaatactaatgtactacattaaataacataataaattattcacagaaggcacctttataaacaccagctgacattaatgcaaagccaggactcaatccatgactctgatcccacgttccaagttcttcccgctcaaaaggtagtccacctgactagccctcaggccaaagatagcaaaaggatcagtgggatctctctgaagcttagcagcaatggccttatgggtttttattgtccatggtcagctctgccaagaagcacacacaaacatttctcatcagctcatggatattttcactggccttgtctgctccatgaaacaacctttggaggtcaaattgatgaaaggtgtggtcttgcctgtaagaccaggatcgagtctttccctctgagacaagtggttcttcccagagctgttaccaggcatctaggtccactagcagagaaccctggcctagaagtcagaaggtttgtggcccaggcatcggagtcaagagatcttagacactactggcaaggcatatagcctaaggtgtataccttaacctcactggagctcagtttcctcatctgtaaaatgggaataaaaatgcctgccccagctatctcttagggctgatatgaataattaatgaaagagatatgcgaaattaaattttctaatttagactctagattattggggtcttcttcaatcctttccacccaggcagagtctttggttctaccaatatgtaagttttaaaatgtgatcaaaggaaagccagagctatcaccttgaggttcctgaatctgccctcctctcctctatcaaagagattatagcacacacaggcgggtagggaggatcctaagcaccataaatacatgtaggcaatatccatgtctttcaaatgtttgtccttggtgagagctgcagctgtcttttaatatggctaaatgaagtaggggaaaatcagaaaaatgcaaatgagatccttattttaggcaaatcaatctcagcaatgctcatatctgatcaagcttatctttaggacgatcattaggataatggattaatgtgaaagtttatttttaccctgtctgctctcactccttgaagacccttcagacctcatcttgattctgccagacaccccaggaggacgggaactccttaccagtcagtttagtccccagcattcatgttggggcggactctggcaatcatagggttcagctcaccacaaggtcacccagcaccacactgcccccacctttcatcatgtgacctgagatagctgcagctacccttggactccaggggttttatttaggaagtcccagaaaaagataagaaagatatgtgggaatttctttacaaggaggcctttgagagacctgaagtgtgataaagagattaagagaataagccttgaagtcaggcagccctggttgaattctagctctcttacttacttgctatgtgaccctaacttccattagccttggtttcctcatctgcagaatggagatcttatttccatctacttaactggggtgttgtgagatctaaatgagaattgtgtccatgcagcacctagtgaagtatctgacatggggtaaaaatgagagctactgagcacttaataaagcactgtcccaagttctttctatgtattaatttaataccagcaataatcttataatatgggtgttatagcccccttctttaaaaaaaaaaaaaaaaaaggaggaggaaaaggaaggcctgagaaattgagtgacatagccaagggccaagatttgaacccatggctctagagcccaccgcatcactcctaccctacagctcttgccaacttgctggcaaaaatggagaagggtcttttgctcgcacggaagctggacttgtagtgaacccctctagaattccatgtaattagaaacagagggcaccagttcaggaagaaagaagcaggtaaaggagaaggcacaggggcccagagctttcactaggcaggaaagagagacaggcagcaggatcctgtccacaagcagccatcccagagccattttctagaagggacaccccctacgcagagcccctgacactgctgtcctgagcctgaagcccgtctaaggcttctcttccctgcatattgagaagggggctggagaaacatcctggggctctgcagagatgaaagtcacggcacaccctcaaagcctttctcattttaagcattagatcactttgtatcagagccacttggagatgagaaagtgggagtccgccttggggcaatggtatctgagtctgagtccaaaaatgtttgcctatagatgtaaagaaaagcccagattattagaaacaacatagcaattaagacaaaagattaggaaattcaggcctgtttcaagttccagctctaacacttactaggtccatagctttgagtgatcatcctaatctggtgcctcagttttatcttctgtaaaatggggctaataatacctacctcataggatttagggaattaaataagaaatatatgtacagagctgagatagggtctagcatagagtaagtggttaatgagtagtaagtacttattattatatgtggtggttttaaattcctaaaagacaaaaaaaacatacattcagttgaccatgtgtatgtggaatgggcaatgtgcgcatacttacatataaacatgcatttatacgtatttccccaggcacatccctgaaaaaccagtatatactcagacattcccttgaatcaaaatcgagtctattccacttcctcctcagtccagtgaggtgttcaagacatcaattattatccccattttagacatcaggaccccaagggacttagcagcatctaagtagcctgctcaaagattcaaggctaatccaatgtcctccgtactcttttcttagccttcctgacaatttgtgttcactgccccctctaattctctgtccaagctaaaagaccgtgaattccacacacacacctcccccccgcacccccccccccccccggctgccggcaaatgcagcctgattatcggaaggagatgcctgagaagagtgaaaggaaaaaagaaagaagatagagggagatggggtaaagggacatgtggcctcgttcttcactgtcccaaattcccttttcaagggcataagcctgcacccacctcttccaaccgccccctccatccttgtctctgcccctgtgtccctgtcttgtcctcccaagggctacagcaatatttcaaatgttcctcccacagctgggtgcctgcgctggtttctgggctcctggcatcctgaagccccaccctgatgctggctccacacgtgcctgtgcacattcagggctgtgaagggtcagtgggccacgtgaaattccaggaaggaacaaggcttcaggggtgctgtccttggctggttcctacagcacttccttccttgtaccccgcagagcctttggcatgtagagtcacgtgttcatctaagtaccactgatggttttgattttctacctgaagagtgcacagaagctggccttggacaataaaagcaaaggcaaaggtgcccggaaggaaggatcagtgtgaggagggtatggaatggtgcatgcaaagtaccagcacagcgcctggcacagtgtagactcctcacacagagggctctcctccctgcccccaaggagatctcagaggcccccctcctgccaaagcggcatttcaactcctcgcatacacttgggcttcagtccattacacaaggaaatttggcttcatttatataaaggggctaattaccacatgagacataattacaagacaggaaatggatttatagatgccgtcagtgggaggggaagttgcagcggctgcttggactgctccgtgctcctaaggggctaaagctgtccccagcggacaggattcttgccctgggagttcttgctttgctgagaaatgtgctcttagagaggtcggcagtactacagatttctggaaatcaaatctagttctgtctctgaatttgttccacaattggcaatgtattcccacaggttctcttcacacaataaaaatcatacttaagaatgtagttagtcttaaacattaaaagagaaagataagtcttatgatagattccaaaactagcccaaaggagaaatgctgggtagaaactgtacagcactagtatctgctcttctttgaggttagatgaaccctgagaaagagctatatttgccagacacggtggtgtgcacctgtagtctcagctacttagggggctgatcgcttgagctgaggcattcaaggccagcctgggcagcaccctttctaaaaggggggaaaaagagctatatgcctgctaattgacctaataaatagtcccttatgatttcatttttcaccttaaaaccatatatcttaatttagacacacatacacacacagaaacagacaataggcagaagtgaaaaggcccttcctcattgataaccaaagataagcaaattagtactagctaatatgtggggagcacactctgtgccaagcactgagctttgctgtcttatttgttcatcttcacaacagtcccatgaggagggtgcagtcataatcctcaattgatagctaaggaactgagacttaggaaggtcaaccaaggtggccaagtccatactgtaaatgccagaacaagcgtttgcacaccacttgtctgaacacagagcctggattctgaagaacaatgagaacatttctcaaattaacaataatatattctcaagaatcttaaaaataaaaatttttctatttaaaaaaaatttttaagaaaagaatcttaagactatcactcccggagaccgagcatttgactcctgatcacctatctttatgaaataatctaaaaaaatggaaaaagtttaatgcacaaagatcttctgagcagagtaccttgattataatggggagaaattggaaactaaatgcttagcaatgagggagtggttacataaactatggtacatccataaatggagtattattcaataattaaactgatgtcgctaaagagtttataacaacgtgggcaaaagtttatgttacgtggaataaaaatagcaggattcaaatatgtatgcgttacgatctctacaaaaaaaaaatacgcaaagaaggacatctagaaggaaatgtaccaaaatgtcagtttgtctttttttaagcataattatgactgtaagaaaccattttctgtcttttgtgacagctctttattgtttgcactcttaacagtgttccccaggccctgcccacgcctgtgagtactttatggtgaggtcttgcttatctttcctcacagatgtgcatttcaaagaaccactatcatcataatttaacattcctgtaagtgttcacacaatgggcttcccttaagcagaagatatctgtgccaaagttgcgtcctttgtcctggctgatgacatcaggtacagagtaagggacccttttaagaccaaggaaaggaatgcctaagggtcagggctacaggtactatgagtctcctccatagctgaatggtcactggttcatttattcatgcacaccacaaacttgtgctgcgtgcctaccatgtgtcaggcagcaccagtttgggttctgaaaatgtagaaataaaaaagccaggccaagcatggtgactcatgcctataatcccagcactttgggagcctgaggtgggtggatcacttgaggacaggagttcgagaccagcctggccaacagagtgaaaccttgtctctactaaaaatataaaaattagccaggcttggtggcacacacctgtaatcccagctactcaggaggctgaggcaggagaattgcttgaacccgggaggcagagattgcagtgagcagagatcacgccactgcactccaccgtgggtgacagagtgagactatgtctcatggaaaaaaaaaaaacctgtcaaaactttgccatgtggctctaaaagcatctctgctgatcacctaggaaaatccgaagacgccaaggccaaaataagtaactgaggctctgtggcaagtcattggctggagaaagaactggaaaccaagtcagggccaggtacgatggctcacgcctgtaatcccagcactttggaagatgaaacgaggggcattgcttgagctcaggagttcaagagcagcctgggcagcattgtgagaccccagtctctacaaaaaataaaaaattagctgggcatggtgtacacgcctgtagttccggctatctggaaggctaaggtgggagaattgcttgaactcgagaggttgaagctgcagtgagccgtgattgtgccactgcattccagcctgggtgacagagcaagaccctgtctcaaaaaaaagaaaaaaagaagccaagtcacccagcactttgcactgggcagaaggggatacgaattctccttgctggtctaagatagcagcctctttgtaaaaataacagtaataataatcagttctgttggtagtttctggtgcctgtggtggaatgacaaggacactagcataagtggcttgtcttccatgggccaggcttgtgcctaagactggtcttcctaacacagatggtccaccagggtggttgataggcttcggtctgtctagaagcaccatgctgctcctgtgcttccaacccaggaggacgcatcacacccccacaccacagggagttccacgccagggcagcgtgagaatcagacagacctgggttctgccccctactcagccactttctagctgggtggccttgggcaagtttgctgcctcttctgagatataaggtcctcaggagaggggttgttgtgaggaggaaatgggataatgaaggaaaaacctgaagccacagcatcacttgaggcatgttcagcttgctcttggaatttggttccctcattctccccaagccaggtcagaggcctccaggccactgtctccaaaggcccctctcagacaagagcactgacccaaggcctctctcgagcagtctgctcacctgaacggcccatgagagacagtctgccattttagcctctaacacccactgctttctgaagcaacaaggcctaccttctaagacacctgcattagtggagagatatctgccatcctggcaaggcagctgggaccccagattcagaccgccaagagtcttgggccttcagtagtcggagtcctgtaatgagacagaagcaagagctcaaaggctcccgcgatgcagccttggcccagaagaggatttccctgtggaaaactgctggagtgccaccacaaggctgtgggacaatagagaagggcccgggaggaaggagtggagagaaagggggagaaacagaaggtaaatctctggaaggacagttggggaggagatacgtgtatgggcttcgggaacagaggaaaaagggttttgcttgagtgaccttggccaagtgtttaaaatctgtgtttgtttggctgccagaatggagggagtgacactttctcttgtgcaaaaggtatgctctgggcccaaagattcagaggggtgttcctaaggaaggccaggtggctcaccagacaggcatttcctttcatcaactcaccacagtccagaatctgtgcatggcctgagaagctcccagacctgatttattggcatatggatggttcacgtctcaggagttagagtgtccaagagcacaagaactggagcataaatcccagaaggccagggagcagacttgatgggtacaatggctcagggagtatctcccacccagaggcttggcatcccagggacctatggaagtgtcttgcttgtgaagcttggaataagagtctatgacttgctttattgatcttaatcagggtcccctgtctaagtggcttgtgggcctctcaccatccttccacagcattgccacagaaaggtaggtctctatttggttagcctccctgtgttctcttcagtgtttgggcatcaccaagttctttgggtttccttttccatcctaccaggccaaccacttgccttctgttctccctgcctttcccaaaagaatggaaagcaaattgcttggtttccactttgtaattacactccttttgggaatgtctccctggtcaccttgaatggcactggaggtagcggggagggagtctcaaactcttaagtcacatcttcacagactgatttttatttcactgtaagtggctgttctcacccattgtgtaaaatctaaagagtctcgttctcaaatggaaactttattttccataccttcatgctctgggtaggggagccctcattatcatgtatggataacattttcttcacagggtggaggtgaggattaaatgagatagtggcatgggtgtgcatttgtatttgagttcttaggccaatgtctcacaaatcactcaataaatcaccatcctacaactcctacccaccacatgaccaatatgtgagaagggaagaacaaacacaagagcctcagcatcttagtctttgccagaaataaagctgggctatggaataggaaggaagaggaagctgaggaacagacatacagttttgatatttgtccccgcccaaatcctcatgttgaactctgatccccaatgctggaggtggggcctggtgggaggtgtttggattatgggagtggatctctcatggcttggtgctgcctttgcgatagtgagagtgaattcttgtgagagctgggcatttaaaagtgtgtggcaccacccttgccactctccctctcttgctcctgctccccctttggcttccaccatgattgtaagctccctgagaccttcccagaagccaaggagatcccagcaccatgcttcccatgaagcctgcagaactgtgagccaatgaaacctcttttctttaaaaattacccagtctcaggtatttctttatagcaatgcaaaaaacggcctaacacaaacagttagtgaaagaggggagctacagctcaaattttctctattcaacacaagatctttattgcgtctctccccctgggctagacactgtattacagcacccgtccttaagaaacataatgaggtctagacacatcaaaaatccaactatgtaatctaagtgtcaaggtctgtggatataaaatggggtcccatttacttttattgtccacatgacaatgacttgggctcccacctcatccaaccttccttacaaaaggcatttcccagttatttggagcagtccccaagggcatatcttatatgctcttaaaacaacccacttatttacaatcaccacacaacatccatcatattctccctctcctatttcaggtgccctgtcccatgtcacagccctggtagcatcggagggagattcttagatgccccttctgaaatcaccagtgatcttcggagggtaccatctcctgatgctctcaatatcaccactatctagagccccagatctatgtcggtgtcacattttgtctcctgggccccaaagcagcactgtttgagctcggagtccataaattatctcaccaagaagacttcagacctcccattcttcccctctatgcctcactccctgcaagcaacttcccatgccctaacccagtgagggcgtatgtggaaatagccagccagctaacctatgcagctgttgatcaaccatgcctaccaaccagaacagtaaaatggttttgcacctacctggctttgaagacaagcagtcctgggtgccagagtcagcagcgctcctgtttattaactatttgacttaggtataccatatcttatactctgagctggtttcttcatctgtaaaattgagataatcatggtagcggcttcagagagcaattgtaataattacttgacataaatcatgtaaagcactacttcccaaactatttcccataatatatgccagtggagggctcctgttaaatctatgggttccaggactttacaccaagcctagtgaatcagatcttcagggaggggctcagaatctgtatgctgaatgagtgttccaagtggttcttttgaccttatgggaaatgctcagtaaatagtagctttgcaaagtcacaatttacattaccaatatctatagtcagtttaacaatgatgtcacaatttccatcaagaacaatgagtacaatgttttacttctggataacaaaagggccattctgagattttttttcttaaagcagcagtctcctccaaaggtaaattaaggtctgtaaatttagattcagaaaatgatctgtaaattttattttatcttattttattattgttttattttttgagacagggtctcactctgtcacccaggctcaaccttctcattgcagcctcaaccttccaggctccagtgatcctccctcctcagcctcctgagtagctgggactacaggcatgtgccaccatgcccggctaagttttgtatctttagtagagacggggttttgccatgttgttcaggctggtctcgaactcctgggttcaagcaatcctcctgccttggcctcccaaagtgcagggattacaggcatgagcaaccacacgggcccataaattttaaatgagcacttatcctgcttttacctactaatgtttcaaaaactttagggactgatcatatacaggtagccctattatatcatattctctgtagggtcctgcatacaataatcatcttcagaattatgttagattcacatacacaatgtcaacacatgtacaatttttgaaatacaccagactcagaaacataacccttgcaaaccttgggaagtgttcatatatgtttttattactcaattttttcatcctcttaaatcttccacccaactgtgatcaatcaaggctatcctttataatcatggacttttctgtgatcttttctacaaaaactttcatctcatttctgaagcatcacttctcttctaatattgtcttgttttccaactcattacactgataccttctcctcagtgtgaaattactgacatcgatgaggtgtgaattcaccctcctgggttctgctcctgtacgagttctctggagaaccatgagtcatggcttccagatgagaccctttgcccatttttgtccattgacttattggagtaagctgtcgataagagtttctctatgtcaaatgagggttgagctatatttgaaggtttacccatgttttgtagactacaagcctttttcatacgaatcttctgatgttccaattcccttttgaggtggtctctggtatctccactggccttttatttatgcatttgcttttgagaggggctcaccaaattgccctccacagacctactgggggggccctgctggccccttccacccacccagatcacagcagaaacattgaaggcaaaacttccaacttggatcccttccaggaataatagtaatatcaactattctgcattctgctcaaagctctatctaaatcatcccatttaatctttaaaatggcccttcaaagtggatattattacaatactcactttaaatgtttggttcaaagaacttaaacaacttgttcaaggtcattgagccagtaagtagcagagcctgatcctttggacactaactatagcttccagtctccgtactgttgccccaattccctctcacttttcatcttcttcctagtgacttaatgggagccccaatcttgccaaggggaagtccatagtctttaacactttcagcccagcttggcaccgagaccttgcccagcccagctggacttgcatgacagagaggctttattctccagtcctgtgttcctccacagccattctctgaaggatgaggtcattcttcatagaattactttctgctcctccagccatactcccctaactgcagcgcccctcaacacactgtagtctcccagttccaattatcatcaccaggctgagtgggcccttggagacacctccaggaaggagaggactaagttaaagtccaggcagcaaagatactgtattatctatctctgtataacaaattaccccaaagtttaatagtttaaaacaaaaaacgttattatctcccagtttctacggggcaggaatatgaatgagtcttagctggatgcctctggctcaagttctctgaagaggctgccatcaagctgttggccaggaacatggactcatctgaagactcaactagagctgaaagctccaatcccaagcttgctcacgtggttgtcatcaggcgtcagttccttatgagttatgaggctaaagatcttagttcctcgtcacaccacataggcctctccaaaagaccactcacagtatggcaacttgcttcctctaccacatgtgattcaggaaagacagcaagagagagcacacccagggtgcaaaccacagtctttttataacctatctcagaagtgccgttctatcatgaatactgcattttatttgccagaagtgaatcattagtcacttagtggaaggaaattacacaagagcacaaataacaggagatggagatcattgccagagcaggggttgcagggtggtcgggacttggtaatcccactgcaggaaaagccatttaaagccttggcccagtacttgcatctcaggatgtcaagaataagagatcatggctgagcatggtggctcacacctgtaatccccacactttggaagtccaaggtgagaggattgcttaggccaggagttcaagaccagcctgggcaatatagcaagactctgtctctacaaaaacaaatgttttaattagccaggatatagtggttcatgcctatagttccagctacttggtaggctgaggccaggggatcatttgagcctaggagttggagattgtagtgagctatgatggtactactgcactcctgctaggtgacagagagagagagagacactatctcaaaacaaaaaaaagaaaagaaaagaaaaccaaaataagagatcatgatctcagtaactgaatcctgtggagaagaaagaatggggttctttgtttccagtattggctctgccactatttgatttgcaaatctggcaggtcacttggcttctctgacccttggttttcctccaacgaatgaacccctagagacaaagatcttgtctgatttacttctgtatacatcaaagacctcacagagcatttggcacacagtcagagcttaatgaatatttgcttaattaattaattacactatgttgaaaggttgtgaggatcaaaaaatatagttgagtgttgtaagtcatcagatcacagagacctagtgctacaaaatcttaaccatgtgaaggtcttatcatgaaacagaagtggactaaaccgtgctaaagggcagaaaaccattagattggtgcaaaagtcattgcgtttttgcattgaaagtgatgacaaaagctgtgatgacttttgcaccagctaataccattctcccatctccctgtgtctgaagcaaggctcttcccttccttcctcaaaatggaatagccctgaattacctgttttttaaatgatggcttttcttatctcttttgtttcagactatgcctactataacttttttttttaatctaaagtgttttatgaccccctcatggaacctaagttatcctgtctcataaatagaatgtaggcaacttgagggccctcaaagcatagtggtagacttaagaatgatgaaaatatctagaattgagagcaagattagtggtactagccattgtaaggaaagaaagtcccagaaagacaatgattggatgccttttctcctactcttcatcatgggatcagggttttgtgggacagaggagacagaataaagaaaaggtggaaaagataataatggcaaaaacttatgtataatgtctctgtaaagtctcttctccagtaatcttgagatgtcacatcatttcctcctgtgtaacttcttgcttcataaggacaaaatttcccaaatctctgcaagctgaattcattcctctgcataacctaaaaggccatgactaaagagaaaagcatccctgtgcaagtaaaggagacaagaagggaatgttcatggaacatgtgaggtagtgcgtatgaatgcaggacccacctgcaccaggtcacctaaggtacttaggttaaaattctgatgctcagtctttactccagccctctgaatccaactctctggagaagagggaggaataagagtagaaaatctgtccagtggtctttgttgggaaggtgggaagagttgcgaaagatctgtgcctggcaagtttccagcctggtagggtgttatccaaagcagacagactggaaatgcaggtctgcccttgaaacctctaaaggtcaaagtagagatgctgaaatgaaggtcatctttaaattctaaagagcaggactgaaagcaagagaccacgccagtggatcaggaactcaaaagattctttcatcagtcagggtcaggagcaggtagaaggccctgataagcgctggtaacaaaaaggggttcttatttaccatggtggtcgggtccatgggtgggtctgcctagcctaaaggtttttcttcaattgttgcacacccaagaggaatgctgtctccgcccaccatttcccctgctgtcaccttccacgactctaactcagatttgctgagattgacagagctgccaggggagccagccgggctgtctggtgtgtgtagttaaaaataatctttagagattgctaagctggcttctgaatatctgtggctctaattaatgggtgatcgtcatgctgttatatgaatttgaaaactactgcttccagaatgcattgttgccccagctgctgtctgccaagccaccccatattgtccccatcacccgctggcccccacccaccccaatctgtcacccccagggaccaaaacctgtgcttaatccactggattccaagtcttggcctggttaccaaaagataccctgaaaaacagcttgaacgcagagaataacaaaggggcttcatcacagcttatttcacttatttatttttctcggggatttctctgcttcagccgcctcagggggcaggtacaacaaaatgacagaaatgaaaacactgagccacattaaaatgctctaccagcaacagccaaatcctgaggctttgagaataagctgacagcaagtgcagctgtccctctgctagcgacacgagtgtaggctgattgatggttttgggcttaagcccaggagtttaatgataatgatgatggtggtgatgataattattataataataactaacttttattgagtgttttctatgtgccagaaactgttctatgcattgtgtatatctctatctgcatctctctctgtaatatctacatatctaaaatcttatttaattcttactgcagttctatgaggtaagaaatattattaccccattttacagaggaggaagctgaggcccagaggatttcaataacttggtaaatgagttgtggggctgggacatgaatggtttctccttcatcattactcaagtcttctgtagaaatatgatgaaatatattgcagaaaaacaacctctggatccctactgtttgaatccattcctgagttcacatactagttctgatatttactaatggtgtgaccttggcctcagtcttctcaactatataacagcgagtcaaatgcctccctaattttttcagttgggtcctttcgactgtgaattacagagtcgttcaatcaagtcacctcatgaaaaggggaatttattgaaaagatatatgctgtactaatattttttttagaactacagtatttgagtgcaagtaatagaaaaccaactcaaaccagcttaatcctaaaaggagattccttggctcacataactcagaaggatgagataaggtgcaggtgagagacagcttcaggcctctctggatttggggctcaaatgacgtgcctgagcaactttgttactctttccgcttctcagttctgcttctctctctgtattggcctcattctttgctgctatagttgggcttccactcttgagcctgcaaagatgaccacaagcaatcctagcttccacgagccaggaataagcaagcaaagaatctaaccaaagtcttagagacagtgcagccctgctgacaccttaattttgaacttccaacctccagaactgtgagataataaatgcctgttgttttaagcctcgcagtctgtggtactttgttatagcagccctgggaagctaacacagtccccttctctttcctcacctcgggaggtgagagctggcaggtgatccagcttcgctgtgttgaactccatgtatccgaccatggcctctgctcttttttatgcctggccacctctgcacccataaacctgtcacagagggagtcctgagactcatgtccacagcatggatgcaactcaaataattcctcagcctggtattccttagcacaattaagtcccaacaagatacagaagattgcaacccccacaccatgcttgattctcagtagataagcaagctaagtgtcctcccggagtgcagttctgccttgcccagtcacagatctgctatcaaactttgttcctcaggagtcttaggatttttgcattaatgagactttaatggagcaaaacacgtggtgacatctaatggtgtccaagataaactgggccagaagacaaaaaaaaaaagcttggtaataaccatgtaaattattttacaaagccctgctttagaaattcttaaccccttaaactcttcctatgccttattttccatatccaaacaattaccaaaacctggcaattctacttttcaacgaggatttcaacaaatagttgttgagtgcccaccgtgtgctggaaattgctctaggaactggggacaaagaggttgagcagaacagataaagcacttgcttacacagggcttatattttagtggggacctggcaggagagaaagtaagcaaataaacaaatagataaatacttaatatgtcaggtggctatatgcaataaagaaaaataaaaggagataaaaggatagtgagggatcaggggactttttcacacaggacagtcaaggaaggaccatatgatgagatgacatttgagcagagacctgaacgaagtgagagagggacagcaaagtacaagaccatgcagatatctggaggaagagcattccaagcagaagaagtgtaagagccctgacgtggaaacaggcatgatgtgttggaataatggcagggaggccagtgtggcttgaatttgatgaatgagggggaacggtagagaatgagatatgagaggtagctgggggccaaatcatgtagggccttggagacctctgtaagatgggtcatcctctgcatgagatgggaagccactggaaggtttaggcagaggagaaacacgatgtagcttatcttgtaaaggatccctctggctgtcatgcagagcagtggcaggatcacagttcactggagcctcaaactaccaggctcaagcaatcctctcacctcagcctcctgagtagctggaactacaggcacacaacaccacatctgtctatttttaaaatttttttgtagagatggggtcttgctatgttgtccaggctattctcaaactcctggccacaaatgatcctgccacctcagcctcccacagtgctggtattataggtgtgagccaccatacccagccagttttatctataacttgaggggcaggaaagccccctggttgacatctgcctgacatatagaaagtgtgcaggccaagcataataatcatgcctgtaattccagtgctttgggaggccgaagcgggaggagagcttgaggccaagaatttgagaccagcctgggcaacatagcaagcccctgtctctaacagaaaaaaaaatgaataaaagaattagctgggtgtggtgcatccacctgtggtcccagctactaaggagaccagggcaggaggatcacttgagccctggagtttgaggatgcaatgagccctaattataccattgcactccagcctgggtgacagagagagagactgtcaaaacaaagccccacaaaacaaaagtgctcacaatgttcattattaatatgattcgtcgaatgcttaagtcccttcttacagagtgctgtttaactttcagctcaactccaaaaagctgactatgagattaggtaggggctcttgactcttggcccaggctcttcttatcatcaccgactgggtcctttatgcagaccacaatggattcactaccaagagaacccactccaggccggcgcagtggctcactcctgtaatcccaacaccttgcagagctgaggtgggcagataacttgagtccaagaattcgagacaagcctgggcaacatggcaaaactccatctctacaaaaattagctaggtgtggtggtgcatgcctgtggtcccagctactcgggaggctgaggtggaagaatcacctaagcatgggaggtcaaggctacagggagctgtggtcgcgcctctgcactactccagcctgggtgacagagtgagaccctgtctcaaaaaaaaaaaaaaaaaaaagagagaacccactccttggattaaaccatgcccagttaaaccatgcccaggctactaacaatgaccatcagggtaatttataggttcaagcaacagtgaagaaagatgagcaagtgctgtggcaaaggtaacaataattataatgatcactcctaaagcctgtggctctgagctcccacagtaaaatcctaggctccctaccccttctccctcatcctaagacccttcttcttcctctcttcctccaccttccccagtcccaggagagtccctgaagggttcaccagcctcttcattacagagatgaacattacagagaggagttacacagaggacactgcctgagggaccaagatcagagactgagtccaagagcaggagctggggtgaccagcccactgtcagtcattcttttcttttcattgaattggtctgtattttgagcatcatgtaaaaaaaagtcctttgcatttccaaagtgcttttacatccattattccaaaagatatgtagagtgtgtctattttgcaggtgaagcagctgggctttgagagggtaaggcattgccagaaggtcacccagctaattgcaaacgatctagggccagaagatggtttcccccactcggacctgagtctcctgttggctgccatcatcaatgcttcaccagcaagagtgactcccactctcttggtggaggatgggggagctcagattcagaatatggagaatgttccagatgtcaacattttagccttaacaaatttattgaaaacacatttcttcaaaataatttattcctaaacagtaaagcagtggggaaaggcagttgtcaaagaatgaattgaacagacaggataacagacaggttaaggggaataattagaggctttttctcgttgttcaacagcttctttttcaggcctgtcaatcactgtttatcacacttgaaccaaaacaatgatttttttttccctctctgaggccaggaggacctactggggagatagtgactaacgctgaggcaggaccagtgtgtcatacagactgagactagagtagctcaaaattgtttatgtcagcacagaaaccaggagtaccatgccaataggaagggcccatgccagtagctactattacatctggcagaaggaggcgcaaatatttttctgagatcctattttgtcaggtattctttatttaaacttctcaacaaacttgccagatggacacttttactcccatttcatagatagagataccaaagctcaaggttgttaaaaagcatgcacacacaaaaagaaaatgtgcacagctccagtgctaacagaacagcaccattccagaagaactgtccatggacacaactaggatgggtattaggatcccgatagcaggctgaggttcaggcaagtccctgtctcactgggaccctgggtactaagagcaatcaatctggctccagataaggcatgaagcagaggaagagcaaatgcttaactcaggggcacagggttagggagggagctcacccttggcaaaagaggtgcctaaactgggttagtggcacagtcatgttccaaagcccatcaaatgaagttctgagactttggatgaagcttacccaccttggaagaagtaaacctgacagagggaaagaatgcagggttttaagtgggtgcagatggaggagctgacccaggaggaataagagaagacttcctggaggaaggggtggccacattgagtggtagccacgtatgtgaaagtggaggaaaagagaaaagaattcccagcagagaagacaagaaacaaagacatgcatgtgtcaaaacatcacaaaatggggagaaaactatagttggatataacttgagtgttaaacttgaagcaagaagtggccattaataagccaatagctgataatagctaacttctactgaatgcctagcacattccagattttctcagttttacatatagtattcattcattcatttcacaaatagatattgagcactacagggatggctgcatgatgtgagggtgaaaagtttcaatgcacattgaaaatgtggggcctctagttcaaaagcaggaaaaagctttttacctccttccacggtccctctccactagtcatggtattttttatttgctatttaatattgtattcctgaagcacagggatactggcagggcaagtacagaccctcacaggcacccactgccctgccctgagacttcgatcataggccacacatatgcccaactctgaccctcctcatgtccatgcccaagtcccctctgaggcataaggtggcagttgctgagaaggaatggaagaggaggtaggtgagaacccatctggaagaggtgaaggacaacagaggcaaaatcacatgcgaattggagcacgaagcccgtgaagcatgctccagtgtccagtcggactcacttacaaaacacagatgtaaagatcaaattattaagaatttcaagatggcaaccacacagcattaaactccaagtgcagggccccctctctgagcatgggccccatgcacctgcactggttgcatgcccttgaacctatcactggagtaccgccatgtgttaagttctgctctggactctaaggtacagcagtgaacaagacaaaaacatcctgctgtcttgcagcttacattcaagtggggagagaaaaccaaccaaattagcaaggcaaatatatggtatatttaagggtcataagtaaaatggatgaaaatgatgcaagaagagagtatagtggtactggagaaggtgcagtttttaagatagatgtctagaataggctcattgagaagatgactcttgaacaaagatttgaaggaagtgagaaaataagccaagagcataggtggggaagactgttccaagcagataaaagagcaaatgcgaaggccctgagtcaagagtgtgcttgccttgttcaaggaaggcggtatagatagaatgggacaagtgaagtgcaagagatgcaatcagagaagaagcagaggtacagatcatgtagggccctaaaggtcattttagggacttgggcatctctgagtgagatgagaacctgtggagagttttaagggggaagtactataactggacatattttaaaagagttactctggctgctatgtgaagaagggatgactgagctgagtgtcaaattttgaatggtagcaatgcaagtgaaagtggaggatgaggacaggagaaatagcatgcaactggagagtattgcaataatcctggtgagagatgatagagatttagaccagagtggcatcagtggcagatgtgagaagtgatctgatctttgcatgtactatattttgggggggccttttttatttttgtttgtttgtttttgagatggagtcttgctctgtcacccaggctggagtacagtggcatgatcttggctcactgtaacctctgctgcctggcttcaagcaattctcctgccttagcctcccgagtagctgggattacaggtgtgcaccaccgcacacggctaatttttgtatttttagtggagatggaatttcatcatgttggccaggctggtctcaatctcctgaccttaagtgacctcagcctcccaaagtgctaggattacaggcctcagctaccacacccagccccatgtattgtattttgaatcaatacattttccccaaaattagatatgggataagagaggaaaagaggactcaaaagttactccagaaattctggccagagcaattggaagaatgttgtcattaactaaaatgacgaagaatgtggatgaagctggttttaggagaaaactgggaattagatttcagacaggttgggtttgaaatgcctgttacactccaaacacagatataaagtagacagttgcatgtgagtctgaagtttggaggtgaggcatagactggagatagaaatatgtgagtatttagtataaaaatggcatttttaaaacaatgagaccgaatgagatctccaaggatccaagtgtatatacagagaagaagtttaaagacagccctggggtactccaacataagagtttaagataaggatgaaccagcaaaggagactgaaatggtgaggtcaatgagatgagagaaaaccgaaaggatgtggtgtcttcaaagccaagtaaagtcagtgtttcaagaagagattgatcctcagtgctaaatgctgctgatgcatcattatgaggaatgaaccacagtaggttcagtggtgttgtgggagtgaaatcctggctaaagtagatttaaaagaaagtgaaactgaaccaattcattattttgaaaattagcaagtaaatgggaaaaaaaaactccaaatatctatcctctttttcctcaaggtaaccagagttaatgaggagaagtttcatgtagatgtattcagccagcaaataatgaaggaatgagggcctactgcagtagctcatgcctgtaatgtcagcagcttggaagcccaggaattcaagaccagcctgggcaacctggtgaaaccccatctctacaaaaaatacaaaaattagctggcgatggtggtgcacccatagtcccagttacttaggaggctgaggtaggaggatcacctgagcctaggagggtaagtcagccgtgagccatgttcatgccactacactccagcctgggcaacaaagtgagaccctgtctcaaaaaaaaaaaaagaaggaataatagaatatcatcatttttgcaactcctgatgaatgaatggatcttgacaatgctcaccaatggcactataaaaagaaatatgtacttccaaataacaaagagcctgaatctaattaagcctctagttctatcaatttataaaaaccacagggagagaggaacccatttagcaacaccacagggatgcaacaggaaaatccagtctgggggaaaatctacaggaaaaaatggtcttgtttcttcaacaaaaacatggcaaaaatgaaaaaaagggtggagagagaaacctctaaattaaacgagatttaaaggtaaatcaacaaattacaatgaatgattcttatttatagcttgattcaaacaaacaacactgaaaaaaatcctgacatttgaaataattgaaaatttggacaatgactggattcttgattatatcaaagaattactgaggctgggcacagtgcctcccacctgtaatcccagtactttgtgagactgaaacaggaagattacttgaacccaagagttcgagaccagcccaggcaacatagggagacctccatctctacaaaaaaaacattttaaaattaacagggcctggtggtgtgtgcctgtaatcccagctatttgggaggttgaggtgggaggactgcttgaacccaggaagttaagattgcagtaagtcatgatcataccactgtactccagactaggtgacagagtaagattccattactacaaaaaataggggaaaaaattactgttattttttggatatgatacagtgtgaggttttttttgtaaaagagctcctatcttttagaagtacatattgaaaattctacagatgaaactatatgcctgagatttgttgcagaataatccaggagaagaggtgagacataaaacattagccataaactgataagtactgaaaatctggtgatgcgtacatgagaatatactaagtctttttctctttgacatatgtttttttgtttgtttttgagacagtctcactctgtcacccaggctggagtgcagtggtgcgatctcagctcactgcaacctccgccttctgagtttgagcaattctcctgcctccgcctcccaggtagctggtattacaggcacatgccaccacacctgactaatttttgtatttttagtagagatggggtttcaccatgttggccaggctggtctcaaactcctgacctcagatgatctgcccgcctcagcctcccaaagtgctgggattataggcataagccactgcgcctggccttcatgtatgtttgaatctttctataataaaaagttttaaaaatcctttcaaagagttttgctgtaaaggagataaaagaaatgaggcagtagctggtactatgtaatcctcaagaacaactctttgaagaaggtatcattactatcattcccattctacagttatgaagtctaagttaagtgacttgtgcagggatgcacagtaatgacagagctgggataaaaaaccaggtagtttgtctttggagctctcgctcttaaccactgtactatgctcagtacgttaaatgtggggaaataacatggtcagctttgcatttgggatcactttgaaagacttgcagacgacaaaattggaggcaaggggaccagcgaggagtctactgcaatagtctaggcaggagatgatggtcacctccaccagggaagtggcagtagaaatgagaaaagtggaagaattgcaaagatatatggaggtaacaccgacgaggagagcttggcaaggctagaagaacaagaatgcggaaagggtcagttatggatgtctgatttacagcttgggtcagtgaaatagctgagacagataggacaaaaggaaaactagagtgaggtaagaaatgagttcatttgggacatattcagtgctgcctgtgctccctattggggaaaatatcagaattgaagtcacctccatttattggcagagttagcttcaccttgttagtaactacaaatgatgggttcctggttgaggaagaaggtaagcatgattttcactgatgcccctctcaggcagagcaaaggccatgaagttaatgttgtgcctccagattctggcctaaatacctccttcctgagtcgatttcctagggccaccctcctttccaacaaatagacatggttctaccaaggtcttggcttcagccctaggaaaattgcacatggtaaaaggaaaaagcttgtaagttagacatatttcatatacagaggttgcagtttaaggaggatgatgaccacttactagttgtggaacactggataaatttgcttaacttttctgagttttgtttcccctaattatttatttatttatttatttatttgagataaggtcttgctctgtcacccaggctggagtgcagtggtgcaaacatggctcactgcagcctcaacctcctgggctcaagtgatcatcctgcctcagcctcctgagtagctgggactacaggtgcacaccaccatacctggctaatttttaaaaattttgtagagatgggagtctcaccatgttgtttggctgatctcaaactcctggattcaagcagttctcccgcttcagctgcctaaagtgctgggattacaggtgtgagccactgcacctggccagtttcccagtttaagatgagaatagtggctgggcacagtggctcattcctgtaattccagcactttgggaggctgaggcaggcagatcacttgagatcaggagttccagaccaacccggccaacatggtgaaaccaagtctctactaaaaatacaaaaattagttgggcatggtgacgggtggctgtaatcccagctgctcagtaggctaaggcaggagaatcacttgaacccaggaggtggaggtttcagtgagccgggattgcaccactgcactccagcctgggtgacaaagcaagactcatctcaaaataaataaataaataaataaataaataaataaataaataaataaataaaattgaggatagtggactgggtttggtggctcatgcctgtaatctcagcactttgagaggctgaggtgggaggatcgcttgagaccagaagttcaaggccacagtgagctatgcgctccagcctgagtggcagagtgagaacctgtcaaaaaaaaaaaaagaagaagaaaaagaagaagaagaacctgtatcttaaaattaaaatgaattattggaagtaaagagtctaacacaggcagctgggtgctcagaaaatgccaattttatacctcattccctctgtgagattcttgggatgtgatatctgcaattccttgtggtgtttgtgagtcatattctacgtctgggcagagcaaggacagcaggctttgatggccttacctgattcgagtgcattccatcctgatctatgaataccctaaaccccatttgaagtacataaattcacaaggtaagactctcccaggactccaagattgcttgatgcactgttgctccctgtagcctcacagtggcaacctgctggggtcatcagcaccacgtgtatggacagctcctcctccaggacttccttaactcttaattccagaacctggcctctgcccatggttctgatcaagatttcccttcctttcttgcccttcttgccatagcttcaagtactcaggccagagtccataggcttggcataccagaaggtacctgaaggcatctgattccaaaacaaatcaggttagacaagcctgctcaggtaaatacattttctaaacctgtatcaccactttttgggaaaggcttcattgttatctattgaggctggttctgacataaagcttatgttttgaaaacagtataactttttaaagttttttaatgagccccttctgggttgaaattaatgtcttttatagttgcattctccctggctttattttccatgtcttaggaaaatgcttatgtagctgcctcagcttttcacaaattatcaagggaattagggcacattttggggagcttgttctttggccttattttgagaacatgtcacttaaataattctctctcttctccccaagacaggcgtggactatgggaggagtcccataactgttgccatggggagtagcttttgctttatttaagagaactaaactgaagcatacttacattagcaaatggagcagattctcaaattttaacataaagccaaagtgtgtgtgtgtgtctgtgtgtgtgtgtgtgtgtgtgtatgtatatacatatatatacatatatatagaaagagagagagagaatgagagagagagtgagagagagagagagagagaggatctcactctgtcacccaggctggagtgtagtgatgccatcttggctcactacaatctctgcttcccaggttcaagtgattctcctgcctcagcctcctgagtagctgggattacaggtgtgcaccaccatgcccggctaatttttgtattttttttttttttttggtagagacgtggtttcaccatgttggccaggctggtctcaaactcctgacctcaagtgatctgcctgcctcagtcccccaaactgctggcgttacaggcatgagccatggtgccgggccatacattcttaaattggggtctttcttctctaaattgggttgtgggctgacataggtactctggtattaggacacctggaggaaaagtcccaattaagagttcctggctgggtgctgtggctcacaccagtaatcccagcactttgggaggccaaggcgggtggatcatgaggtcaggagatcaagaccatcctggctaacacggtgaaaccccgtctctactaaaaaaaatacaaaaaaattagctgggtgtggtggcgggcacctgtagtcccagctacttgggaggctgaggcaggagaatgatgtgaacctgggaggtagagcttgcagtgagccgagatcgcgccactgcactccagcctgggcaacagagtaagactccgtctcaaaaaaaaaaaaaaaaaaaagagttcctacgagtactgaactgaccctacttctggaaggcaagaaaatgagccaggatttaccatataacaatcatgtacacaaatctcgagttgcaaatctttacacatgctatctcaaggagttgtcacagcaactctgggaggtaggtgttactatcactgtttcacagatgagaagctgaagtttgaggaggggtcacaacttacttaagaccactcagtttgcaagtggcagaggaaagatttatgctcaggtcagttttgacaccagactatagtgttaagccactgtctgtgacatcagaaactccagtaggacaaaaggctctgatggcatgatagggattgagtgtggggcatgaagttgctgattccagaatgaatgtgggaggttccagagaatcctccacatctgtgaaccaatgcctctctaaagttgtcttagaggcacaggctggtgctaggacagctgcattagaatcatctggtgggcatgtgaagaacgcaaagagctggattccattcccaaagagtataatccagtagctgatatgttttggatgtttgtcccctcctagtctcatgttgaaacgtgattcccaatgttcacagggcctagtgggaggtgattggatcatggaggcagatccctcataaatgaagtatcatccccttggtgataagtgagttctcgctgagttcatgtgagagctggttgtttaaaagagtgtgacacctcttccctctctctttcttgctcctgctttcgccatgcgatgcacctgcttcccctttttcttccatcataattggaagtttcctgaggccctcaccagaagcagattctggcagtgtgcttcctgtaaagcctgcagaaccatgaatcaatgaaacctcttttctttataaattatccagcctcagatactcctttatagctatacaaatggactaacacagcaggagtgtaatcaagcccaggaacatgaacattaaaaaatgtctaagtgattctgatgcatagatagatttaggaaccaccactgcccttggcaacatttataatcctcagggttcctccttctccctttagttgtaacataatccccagggattcagagccaagacatagttctgaaggaggagctatagttaccatagaagtgatcacacatgcgccattgcactccagcctgggcaacaagagtgaaactctgtctcaaagcaaaaaaaaaaagtgatcacacagactcagactggttagaacagagtgattgtcaatcagaagcagtggtggcatgtgtcagtaccaaggacactttctcaacctcagtgcactcacctcagtggagaacaactgcattaggagtgtttggttatcctagaaatgagcttattggggcataagagataactgtttgctcagggatcaatgttaatcacttctgcattattacagagaagccactgctttcttcatcatatggcacatcttccaggaggactatctacaggaatgtctcatgtgttttgcccattacaactaaagggagtttgcacttgggggttctcgttagacttttctggttagacatctgatgcttccttctttgggttttgagtggtctgggacatgtcaatagcttcctgcacaccaaaggaggtccgagatcaaatggccttgggtataaaagtacatccatgtgctgtgtgggtggtgggaactatggtgaactgcccaagagagatgctacttctcagtttcagtctatccctgccatgcagaaatgcaggatcagtattaccagagcttccgatatgagagatagagaaggagacaaggagagggaggtggagagagagagagaggcatagacagagaagagagagcagatactgggatttctaaatattggctcagatgaaagttaaaaaaatatgtgggccacacaaaatatttctgtaggccacatctggctatgtctgccaaagaaataagttccattttggaagctgcaattccaaagcaccatgcttagtcaccatgctatgttgatttggccacctctcagggtgaacctcttagtgtggtctttgcttttagggagagaaactgagggagaaaggtgggacagaaccatttcttactgtcaccaacaggctctggtagattgctctaaagcaacttactgacacactgacagatttaaatttccactgctgaaaaccactcatatcttactgttgtccaaacccaaagaatcaaatggccaactcaatgctgttagaattttaatagtaatactggttcctcttcctcttatcttccaaatctcccatggaaaaatgatcatctccattgacaagcaccgccatctgcaattggagtaatctgaagctggcattgtactctgcttatctcatcaacccagattccaaggagttgagggatttgatcatttatgaaggggattcgacctgcatttctaccctctaccaccacaaagtaaattgtgaaatcattcacccttttcttcacttctaaatccctgtagtgtccatctttcctgttgcaaagaagtagtagaggggcagaatcagtctgcaagtgacaaatattctttttgccttgcagctcctacttccaccagttctcttctttcccactctctggtgggtgagaactctggtgggtaaatgtctttcctgagaaagaaagcctcaactaagtgggtggttctgaaacaaaaatagtggcaaagacttggctgatggagaagtatccaaggcagttttgtgggatcttcctgtcccttcaaaagcaactgggctctggattcatatgttaaagggacagttaccttggtaagcatctctgtgtgtcagattcctgcccagagccagtagcccctttgaagtatatgatagttatcacaaggatggaaatggagaaaggttttcagaatcacagcagagataatctaaaatattcatgcttgtccactccacccaccccaatcctctggtctgtcagaattagcttggggtaggattttaatcatataaagttcagaaaatctccgtagatgattttacttcacttgatttagtcctaattgaaagctactgaacagagaattatccagccatttgagttactttgggagtattgtggctacatggagtctataaatgaggtgcccattaaaaaacacacacacacacacacaccccatgggccttaaataagatgtggatgggattagacatatgcttagtcacctgaaggagacggggcagctcctaggcataactgaagatattaccaaacctaaagaatgtgccaaattgaatggatggatagtgcagaggaaagagaaggttggtcagtcaagagaacatagacgaagggaagccactgaagcaaggactggtagtgcccatccctgagggagcctcagcaattagaccttaagtatcatgaaccattggcaaaaccatcactatcacaagaaggatgagtcaggccacccgaggctgatgtcagtaggcatcaatcaacctaatatccctggtgctaattccttgcttcttcaaacaaccttctggccccctctcttaaaggaagagaaaacactcgtctatatttctggtccccaagaaagcagtctttcatggtgaatagcttttgattaatcatgatttggcatcccataaagcttgattccaagtccctgcttgatatggcctaagcttactcttcaacctcatcttaaaccactaatggtgaaatgatagaatcttcttaaaaggactttttgtttgttttgttttgttttgtatttgtttttgtttttgtttttgagagggaatctcactctgtctcccaggctggagtgcagtggagtaatcttggctcattgcaacctctgccccctaagctcaacggttcctcctacctcagtctccaaagtagctgggaccacagatgcacgccaccatgcccagctaagtttttatatttttggtagagacaaggtttcaccatgttgcccgggctggtctcaaacttccgagctcaagcaatccacccaccttggccttccaaaggttacaggtgtgagccaccaccccagaccttcaagggctttttttttttaaggtgaaattctcatacataaaattaaccattttaaagcgaacaatttagtgacatgtatcacattcacaatgtggggcaaccaccacctctatcttccaaaacattgtcatcaccccaaaaggaaatcccttagccattaagcagttgctccctattctctcctgcccccagcctctagcaaacatcaatcttcattctatctctttggattttcctattgtgaatatttcatgtaaatggaatcatgcaatagatgaccttttgtgtctggctcctttcatttagcacaatgttttcaagggtcatccacattgtagtgtttatccgtacttcatttcttttcatggctgaataacattccattgtatggatatgccataatttgtttatacattcatccattgatggatatttgggctgtttccacctttcagccattgtaaatagtgttgttgtgaacatggatgtacatgtctttgagtagcagacaaatacagtcctcatttatacacttcttggaattgctgggtcatatgataattctgtatttaacattttaaggaaccaacaaactgttttccaccatggctgaaccattttacattcccaccagcgatataagagggttccaattacttcacatcctgatcaacacttactattatctatcttttcttaattatagccctcttagtaggtgtcatgccctaataactaatgatgcttagtatttttatgtgcttgttggccatttgtacattctctttggagaaatgtctattcaagttttttcccatttaaaaaaaataattatttattcttagagcctggatcttgcaatattacctggtctacacttgaactcctaggctgaagcaattcttctcctgagtagctggggctacaagcacatgcgaccctgccctgcactttttgccaactttaaagttgggttgtttgtctttttattgttgagttgtaagagttctttatagtccagatagtagacccttaccaaatatataatttacaaatatttttgaccattctgtaagttgtcattttactttctaaaactatcctttgaggcacaaaatttatttgtttattgctcatacttttggtgttctatgtaagaattcattgccaaatccgagatcatgaagatttatctttgttttcttctaagagttctgtggttttaactcttgtatttatgtcattaatgcattttaaggtaatttttgcttatggtatgaagtaggtatccaacttaatttttttgtatgtggttatccaattgtcccagcaccatttgttgaagagattattctttctatattgcatggacttggtgtccttgtcaaaaatcagcaccataaacgtgtgagtttatttctggactttcaattctcttctatatctctatccttatgccagtaccatacagttttaattagtgtacctttgtagtaagttttgaaattgggaagtataactcttccaacattgttcttttccttcaatatcattttgactatttgaggtcctttgcaattacattttaatctgaggattggcttttccatttctgcaaaaaagtctttaaaattatgatagggattgcattgagtatgtaaatcacttcgggctttactgccatctaaataatattaagtctccaacctatgaacaaggaatgtctttccgtttctataggtcttccttaaattttttcagcaatgcttttatagttttcagtgtacaagtctttcatcaccttggttaaacttattcctgggcattatatatctggggagaatgctaaaaaggatcattcttactggtgtgcagagaagagtcctcacaggagaaaggttaaaagcagcaagatgcattgtatattcctggtgagagatgatgatgccttgggcaatagggtagtctcaggaatggcaagaagaggttgaattcaggataactttggaaggtacagccaaaagacaagattgactgagatatgggaaaattctgagtcaaggatcacttcaaggtttttgacctaagtaattggtgaatgatggtgtcatttactgagatggagaacactggacaaggcacaagggaaaaaagaacttaatttggacaaatcgagtttgaattgtctgttagagatggttattgtttaccacaatttataattgcatatccatttgtttatttgtttattgttattatttatagtttcaatggctagaaatgtttactttattaactgttgtgtccctcagtagacagcaaactccatgagggtaagaaccaaatctgtctattaactgttgtatcctcatgcctaacacaatgcctggcacatagtaagttatcactaaatattttttaacaaatcaaaatgcaaggccagccagacatagtgggtgtgtctgtagtcccagctactcaggaggctgagatgggaggatcatctgagcctgggaggtcaaggctgccaagattatgccactgcagtccagcctgggcaacagagtgagaacctgaaaaaaaaaaaaaagccaggccaggtccaggtggtttttcctatattcctgatttataatattaccttcaggtgtacatccttgttctttacttactactgcatttccagtactttttatttttgtaagaagtgaggttcctttattcaaaatttgacaaatcatgaaatgcctctcaccccatctccttactccttacactttacctttccatccatgtaatctctggcacaatgtcatgacttaacaaatgccaagaaatgtaagaagaaaagacctagtacttctcaataacaatagctaatatgtattgagtgccaattatgtgtcaggcacggtgtaaaatgctctgtatcatctcatccaatgtttctaacaaatgtatcagcacaaagcctgaagcgttgttgcatcttttcagttttagggtcatattctttggaatatgagtttgtccgtgtagccaaagggaacagttgagatgggtacattaatttacctaagtgagtatatataaatgtcattttttaaaaagatgctggctacgccagcataaataaagccttggagaatcttgcaactgggcaaatgagtaaatttaaggtattcatttcaaaaaaaatccatcaggcacagcctgggcaacatggcgaaaactgcctctacaaaaaatacaaaaattaaccaggtgtggtggtgcccacctgtggtcccagctattcgagaggctgaggtgggagaatcagctgagcccagaaagccaaggctgcagtgagctctgattaatcacgccactgcactccagcctggacaacacagtgagactgtcttaagaaaaaaaaaatctaagcatggtggctcacacctacaatcccagcactttggaagtcgatatgagagaatcgcttgagcccaggagttggaggctgcagcgagctatgattgcaccactgcactccagcctgggcaacagagtaaaaccctgcctcaaaaaaaaaaaaaaatcccaaattgagagacattctacaacataccagtaccacttaaaatctttaaggtcatcaaggacaggaaaagtctgggagtgtcacagatcagaggaggctaaagtgacataacaactaaatgtaatgtgatatcctgcctgggatcctggaaccaaaaagggacacttttaaaaacagtgaaattggatagagtgtggagtttagttaatattaatataccagggtgcattggctcgtgcctgtagtaccagctacttgagaggttgaggcaggagaatcgcttgagtccaggagtttgaagccatcctgggcaacatagcaagaccctgtttctgaaaaaaaaagaaaagaaaagaaaaaaaatatatatatatatatataacaatgtaccaatgttggttctttagttgtgacaaaagtacctcagtaatgtaagatgttagcaataggggaaactttgtaagcggtatatgggaactccatactgtctttacaacgtttttgttaatctaaaaccattctaaaataaaaagcttatgagtaaaaaagggtacagagattggggtcagagcagagatgacacatttcagatctgtcatcccatgcagtgcccccagtcggacttatctatgtggcctccctccaagtctattcatcctttaaagaggcatatccaagatgttgccctctgcacagtgctgcgtatccaggtctccataacagctctggggaacttcactgcttcagcgtcatcccaaggagaaacctttgggagggaagcagacatgggtgtgatttcagacacaaacacttgaaacctggagtggaagttcagtctcttagaattttttattggcaaggaccttaggtgtttgtctcatttttgtagatcaggacactgggaggctcccttttctccttagccatggctggaggccaagtccagccctcaaggatcattgtcaggaccaacacaagctggacagccttgttttcctacctcagatgggaaaaagaaaagaaacttggacccagtaaaaatgagtaatttatttaaaggccagttagggccagtcatggtgactcaaacctgtaatcccagcacttcgggaagctgaggtaagaggactgcttgagcccagaagttcaaaaccagcctgggcaacatagtgagaccctgtctctacaaaaaataaaaaattagccaggtgtggtggtacatgcctgtactcctagctgctcaggaggctgaggctggaggatcgcttggagcccaaaaggccaaggctatagtaagccatggtcataccactgcactccagcctgggcagcagagtgagaacctgtctcaaaataaaataaaacaggccagttagtagcttcagacatatttctcaacaatgttagtttttttcaatgttaatgaaatatcctcccctgccttttaatggattctgactcaaaaccctaatacatagaacagataggaagtgagctgttctggctaaggaaagaggtgggagcctcagttctagctacatatttacgttttactaccttccaataggttagtgaaaggattccatagggttccgaagagttctataggatttctatggaacccttggaagcagagtttaaaatctgtatcactttaaggctgcatattattccagtatggggttattctgtaatttacataaccagtcccctattgctggccactttattcagtcaaactttcaattttatgaacattcatctctgcacttatttctattttatcatgatatggaatttttgggtcaaaggtattttaatgcttttaagacatattaacaaatcactctccaaaatggctataagaatttacagtcccagccgcagtatattcatgagtggctgatttccctataaaaaaatcaacaccggattttaacagtatttttcatttggccaatctgatacagaaaaaatggaatctaagtattgttcaaatttgcatgtctttgatcactactacggctaaacttttggggtgaattttactggctatttaaatattttcatttgtgttctttgcccatttctttctatttggatttttgttgttgttattgttttataaaatttcttcaaaaattaagactaaacctttttattgtttgttttttttgagacaggatcttgctctgtcacccaggctggagtgtggtggtgtcatcatagctcactgcagccttgaactcctgggctcaagccatcctccagccttagcctccttattagctggtactacaggtatgcaccactacgcatggctattttttttttttttttagacatacagggtctcactttattgtccaggctggtctcaaactggggctaggctcaagcgatcctcccaccttggcctcccaaagtactggggttacaagcatgagccatagtgcccagcaactccttatctataagtaaagatttctgagtgttaaatttgccttttgtttatcatataatttttaaatatttatttcaaatctagcagtctttttctttacagtttctgctgtaagctaatgttttttaaattatattgagaaatgtcttccctactccaaacattttcttttagtggtaattcctcagttgtgtgagtgttaagacttctttagtaaaaaataccatagtacactggttaagagtaaaagctgtaggatacaaagtttcagttagacaagaggaaggagtttttgagatctattgcacagcatggtgactatagttaataatactgtgttgcatgtttcaaaattgctgagaaagtaaatttcaaatgttctcaccccaaaaaaatgataagtatataaggtgatggatatgttaattagcttaatttaatcattccacatcgaatacatatatcaaaacatcacattgtactccataaatatatataattatattttgtcaattaaaaataaatttttaaaaagaataagctacacccacacacaaaagtaagtcacagctattggattagttggtcctagatttgagtacaagttcccctgacttattagtcatgagcccttgatcaacttaaattctttgaacctgtttacacatctgaaaatagaaataaaattaatagtaccaacctcatagaattgtcatgatgctcagattagttaatgcttatgacatacttggtatcaggtctggcaaatagtaaacaataatatgagttattacttttttttttttttgagatggagtcttgctctgtcgccaggctggagtgcagtggtgccatctcagctcactgcaacctctgcctcccaggttcaagcaattcccctgcctcagcctcccgagtagctgagactacaggcttgtgccaccacgcccagctaattttttgtgttttagtacagacagagtttcaccatgttggccaggatggtctcaatctcctgacctcatgatctgcctgcctcggcctcccaaagtgctgggattacaggcgtactgaattcatctttatttataatggcatatgatatgatataggaatttgagtgttcttttttaccccagatctttaaccaatttgtcttagcattttctgaataactggtcatttcataattgattagaaaatgtcactgtcatgaaatatacttatatatacttttttaaaaataggtggacaggaagtaggatttactggtgggcatcaggagggggcagcacagtggaagccctcactagagcagggccggacacttgtccagaggaccacgactggggatgtacttggccccacagccatgtaggaggagccacttctcagccaccgtatcttcaaattcatccaccttgggcccagcgtggtggctcacacctgtaatcccagcactttgggaggccaagacggacggattccctgagctcagaagttcgagaccagactgggcaatatggtgaaaacccgtctctactaaaatacaaaaaaaattagctgggggtggcggcatacacctgtagtcctagctatttgggaggctgaggcaggagaattgcttgaacctgggaggtggaggttgcagtgagctgagattgcgccactgcactccagcctgggcaacagagcgagctccatctcaaaaaaaaaaattaatccaccttgaatttggtaaagcaccacttctttgagatgcggatcttctggcagccaagtaacttgaacttggccctgcataggtcctcaatcacaagctgcttgttctgcagcttggtgcgcatggacatgatgacttggcctatgtgaaccctggccacagtgccctggggctttcccaaggaatctgtttggagcctacactgggggtagtgcaaggtcagagacatgaacatacatttgaaaggcctgtctccaaggtcccttagagcaacccatccaagaaacagtctgcgtaccctgacaaggaagctgctgtttgcagccatggcacaccaggtccctgtgaggaaagaaactcagttggcttaattggcttctacaaacttttatttgttatgggatttctactctatttcattgatttgcctgtttgcttttgcacatttagcacactattttactttgtagcattgtatagcgttgtaacatgttttcctacttagttgtaaaagtactcccctgatattactttttatattttcatgattgtatttattgaaacaacttctgtatggagcactgtcatagcttagtgaagggagtactggaattagaggacacagtcactactgtgagtgggatgtatgtgtgtttgtgtagtggagccgtgggggagagatcttccatttcaccattcattctcatatcaggcatagtgtttggtttggaaatataggctgaataagacatggactctgctctcaagaagtcttcagtgtagggcagagacaaataaaacagtgatttttagcactggatgattgtagagggtgatatgggagcacagaggtgggtcatcgcaatgaggaagtgacagctgatttgagttttgaaggatacaattgaggtggcaaagcagaaaggaagtgaaggtagaagggggcacaggagaaaggtcctctgggaaggggaacagaatgcgtgaaggtatatcaatttgtagaaaacaacaacctgttcggtgtggttggagaggatgtgggaggtggggggatgactggagtgtaaaggtacatacacccaaaataactccaggacatctaaagggcagcttcactaccggagttctagctgatgccctttcttctccctgaagctttcagcatactccattgcatgaagatttggtcagtccagattactgaggaagaatcctgtgatattttgtgacatcttttgttcatttttatttaatttccactcctgttccttgaacgcagcttctacaaatttacttgccagacacatctctagatactaggatataaagtgaacaaaatgaagaccctgccctcatagagtttatagtttgagtaaaggaagacagaaaattaaaaaaacaaggatgtaaatatgtagtttgctagttggcaataaaggatgctttggagaaaaataaatctgcatcagagggataaatatgcagtacttcctacattatgttgtaactcctccccactagactgagtgctttttgaggtcctagattttattttatcaattcctgtagttgactagtccagtgcctagaaaagagtacatgtttaataaaaatagaaaagcaatataggttacacctgggtgaggctgccttggcccaattcagtctctgccactaattaatcatgaccttggataaagtactcagttctgtatgcctcagtttccttatcttaaaaatgaagactggccgggtgcggcggctcacacctgtaatctcagcactttgggaggccgaggcaggcggatcacctgaggtcgggagttcaagaccagcctgaccaacatggtgaaacccccatctctactaaaaatacaaaattagccaggcatggtggctcatgcctgtaatcccagctactcgggaggctgaggcaggagaatcacttgaacctggtgggggtgtaggttgcagtgagctagattgttccattgcactctagcctgggcaacaagagtgaaactctgtctcaaaaaaaaaaaaaaaaaaaagacaaagaaggtaccatcctcatagggttgctaagagaattaaataagataatatattaaaacacttaaaattgtccctctgcataggtagcactcaacaaatgacaactgttattactcagtaatggactataatctgagtgcattccaacaacatggaccttagggcaatgaaaataatttattgtcagttgaagatattgctagtgctagagtctgcttctgaatttacaccagtatatcatgcagcccaaatgctgtctgagatatttacccagaacatggcggcatgagcaactgacacagctcctggctgtcctttcatgtacttcagacccgactttgcatcccgcagcccgctagaatggaggctctctgcctcgttactaggtttgggaatatggcattaaaaataggattgtcgagccagatgcagtggttcactcctgtaatcccagcatttcgggggccgaggcaggcagatcacctgaggtcaggagttcaggaccagcctggccaacatggcaaaaccccatctctactaaaaatacaaaaattagccaggcatggtggtgcacacctgtagtcccagctacttgggaggctgaggcaggagaatcgcttgagcctgggaggcagaggttgcagtgaaccgagatcacgccactgtattccagtctgggtgacagagtgagaccctgtctcaaaaaaaaaaaaatagaattgtccagatttatttggtgataacatgttctgacagtatttagcctgcaggccatgtacattttcatcatctcttctcagtgaagggattgcctggagcgatgtcacgtgtctagaaatattgccttctaaattgtcaacaaagtaaaagagagtcatttcttaaatttgtctggggatgctgtagtttgcaaagcactctcctatccattatcattcaatctgcaagcaaacactccagagaggcaagacagggtgatcatttccacttaacggcgatgaaaacgagacttatatggttaagcctcagccacgttcttctcactcatgattctgtctctgtgccctacatgaggtttctcacaaatcctgggttccctcaaactagtcaacatgttgatatgggcccttatcttggtatttatcaatttttatatatttttcagcatatccaaaacttccccatgtttagagacacaaaatatataactatatatttttttttaggttaggtgaagctgacctcaatccactggagcagcatgaatcttctgcacccagtacctaacagctctctgtcatggaggccaacaacccctggttgtaggatggaggctagaattctgaagtgactccaaacaagtccatagtttccctgagtaataatgatgatagttgatctgttaccatggcacaaatcaaggcatactggaaaatatactctgctatatactcaggtcagtagcttttaaaaaattggtgatgtgtagcatattgaaataagtttgctaacttattataccatgtaaggatagtaaatcatcatcatcatcatcatcatcaaataacaatataggggcatttcgacaccaagaaggtaggagaaatagaatctcagaagaagggacagtacatttagctttacgaagaactcacaaatcatcctaatatttcctgttctaacaaggtttgtgcaaaacacttcatcaggcacttgctctagggctggcatttgaaatcactgctctgggagttataacatcatttctacactttttggcctggtatccttaactcctgctatgttcagagctggagaattccaggcctaagaaggtaaaatatggactaacaatacaggttctctgcacatctgagatggcccaaagacttgtgaatcattctttctggatatgctattaaaagcagtgggagctgggcgtggtggctcatgcctgtaatcccagcactttgggaggccaaggcaggaggatcatgaggtcaggtgttcgagaccagcctggccagcatggtgaaaccctgtctgtactaaagatacaaaaaattagccaggcatggtggcacgcacctgtagtcccagctacttgggaggctgaggcaggagaattgcttgaacccagcaggcagaggttgcagtgagccgagatggcgccactacactccagcctgggtgacagagcaagactctgtctcagaaaaaataaaaaaataaaaaaaagcagtgaacgtgatataattaagtatcgtttggaacagtacatttgtttttgtagtggttggaacaacatgttaatcccaagaagtcttagcctgggaataattatggaacctgcagttagcagagggaagtgcctgattggatgccacaagttattgcaacccatggagaagctgtcattcatagatgagatcctgaccttcgtgtgttaccaatacccacattaaaaagccctattgtgaacatttgggcagacattattattgttatcatcatttagagaaacagggtctcactctgttgcccatgctagagagcagtggcatgatcatagctcactgtaagttcaaacttttaggcttaagtgatcctcccaccttagccttctgagtagctaggacaacaggttcatgccaccatgcattgcttactttttggttttattttttggtagagttgggggtctctttatgttgcccaggctggtcttgaactcctggcctcaagtgatcctcccattcagcattccaaagtgcttggattacaggcatgtgctactgcacccagtccagacattataaatgtcattataaagtgaaaagcgtattactaaaaaaaagcaagaggagagagagaatattttttgagtgtctaacatgtgtcagacacatgcaagcaaaccaaatatcattcacaataaccttcaaaactagctatccttattttatgagtgaggaaattgatgtagaagatagagaaccagaacaagatcacatagctggaaactgacagagttcaagtctatttgaatctggaaccatgctttctatataacatcactacggaaaagagaacaagacctagagtcacactgtcttttagcatggtgaaatataaaccactggaaccaaaagtacttgcaggttaaaactaaaggggggcttcttaaagttgataaataccatctatgaaaaacctaccaataacattattctgaatgctgaaagactgaacggtagaagactgtttcctaagattgggaacaaggcaaggaagttttgctctcatcacttttattcaactattcattggaggtcctagacagtgtaataagtcaagaaaaataaataaaaggcctaaatgttggaaaggaagacataaaactgtttttatttatagattaataagattagagaatcctcaagaacctagaaaaaagctactagaataaatggatttagcaagcctgcaaaaaaaatcaagtgtgtttccatataccagcaatgaactactggaaaataaaatttaaaaaccaatgccagcctggtgtggtggctcacacctataaatccaacactttgggaggctgcagctggaagatcaattgagcccaggagttcgagatcagcctgggtaacatggcaagggagacctcgtatctataaagacaaacgaacaaaaaagaatccacagctcatggaacttaaaatatttattggattaaattacagctcaataaagttgattttaaaaataaaaaattttgcattgaaaattttttaaataaattcctagttgtgtccttgtactagcaactgtaaagaaagacttgcacagacccggtctcaggttgtgcacatgtgctctttatttggaaatgatggcctacgcaggtaaacagaggtaaaatgtctgaccaaatagaagaaatgcattgttccaagatttgatttttattgctagactactgcttaaaatctgaacatatcaacaacaggttttgaaggcaggagacaagagtaaagtcacagggatagtcaatggagagaattaatgaggccatgagaatctcatatagggcagtaggaaagtcattaaatgctctcctatcttctatcttgaaaggattcctgaaagggcaagactgaaggctttagcaagagaggatatgcacactctggcagcccagagttctgaggttacagtaggcatttcccagtccaggagagtaaaattaaacagaaatattgtgtaatggatggacccattgtaggcatgtatcctaaagaaatactgggccaggcatggtggctcatgcctgcaatctcaacacttaggaaggccaaggctggaggattgcctgagcccaggagttcaagaccagcctggacaacacagtgagactctgtctctacaaaaaacttttaaaaatttcccaggtgggcccagcgtgatggcttatgcctgtaatcccagcactttgggaggccgaggcgggtggatcacaaggtcaggagatagagaccatcctggctaacacagtgaaacaccgtctctactaaaaatacaaaaaattagccagacatggtggcatgcacctgtagtcccagctactcaggaggctgaggcaggagaatcacttgaacccaggaggcggaggtttcagtgagccgagatcgttccactgcaccccagcctgggcaacagagcgagactccctctcaacaagaaaaaattacccaggtgtggtggcatgtgcccaaagtcccagctgctcaggaggctggggctggaggattacttgagcccagggagttgagtctatagtgagcaaggatagtgccactgcacctcagcctgggccatagagctagagctgtctcttaaaaaaaaaaaaaaattgtacccctgcataaggaaacatggatgggaatacttattgaagagttgcttgtaaaaaaaaaatgagaaatgagaaaggatttaatgaagtaaggcacaaagtcacatctgttttggagcggatcctatcagttccccacccatatgacctagcacttaccatgtctgtgtgtgtcaactgacttccaattgatagcacaagcatctccttgactgaaggctttttctggccaccagagccctctctgcccagatgcaaggcaggccaaaagtccctgagtcaatgtgcctctgaagtagcccttgatcaatggcagatggaagtcagtggataaatactccagctctctttaggtagaagtgttggacagttgtgtgctacattggctcccagtttccccatggagttgagctctggttttacatacagtgatgacttgctttgaaaaacaccctttattggcttccttcccttccctgtctcacttccccattaccctattttctgggatcacctcccacataaagtaatcacacttaaatcctgtctcaaggtcacctttcaaattcagcattatgaaaagaacaaagcacattaataaatagattatgaaaatatcctcataacatattgttaagtgaaaaagcattttatagaactatgtgtatagtataatagcatgtattttgaaaacacaaaaaatagaaccatgcttttttttttcttgagacagagtcttgctctgtcatccaggctggagtgcagtggcatgatctcagctcactgcaacctccgcctcctgggttcaagtgattctcgtgcctcagcctcccaagtagctgggactacggatgtgtgccaccacacccagctaatttttgtattttttgtagagacagggtttcattatgttgaccaggctgatatagaattcctgagctccagcaatctgcccacctcagcctcccaaagtgctgggattacaggtgcaagccacagcacccagccgagaaccatacattttaaaatgtgcatgtgtgtgtgcaaatgccaagaatcttttcatgaattacttgtgattttattttattttatttattttgagacagggtcttgctctgtcacacaggctggagggcagtggtgcaatcacagctcactgcagccttgacctcctgggctcaagctattctcttgcctcagcctccagagtagctgagactacaggtgcccaccaccatgcccagctaattttgtttttattattatttgtagagacgaggtcttgccatgttgcctaggctgatctcaaactcctgggctcaagcaatcctcctgtcccaaagtactgggattacaagcatgagccacctcactcggcctacttgtgtttctaaaagtaaatttaaaatactttataatggatggaagagctcagtttacgtcagcttaaaccaacactgggcactggggacgcctagcaaaataggagccaagtctctgcccttggggagcttgtagagcattaaaggcaacagatgagtaaacatttgcaaggccaggtgacaagtaccatgacagacaaaagcagagtgactgcagtaacccagaggtggggcctggccagccatctgcagaaaaaattcattcctctcctacctgccctgcagccttaggtacacttcaacccaaatcactagagctcagtcagcagagctaaaggtataacaattaagaattaagcaaatcaggtacttaccacccagtcagaatacagttttaatggaaggataatgacatccctggaggaatgtcctggagcagaaatttatcagtgtttctagcacccccaggaatttctagtggacaattacattgacacatcgcccctagcttttcagatctctcaccagcctccggacctcccacccctgccccatgctctgagaccagcccactgagcaaccttctgctgaggatttagctttccatggaggcttgctaggggaagaaagtgtatttgaggaggcaagtgttacaatccagctgtcactggaaggcaatcaactggccggtttcttgcctctgggaccttattacaaggcccattagcccagtggttcccaactttgctgcatattagaatctactggggagcttttaaaaatcctgatgcctaggtcacacctcatacctactaagttgtgtgggaggcgtgggggtgaccaggcagtggtgtgctaaagctggctgctacctggttctggagaacctattgtgtacatctcttccccattctgtcttcaatgatgtcatactagcagcttgaaattaaccatggctggacgcggtggctcatgcctgtaatctcagcactttgggaggccaagctgggtggatcacctgaggtcaggagttcgagaccaggctagccaacagggtgaaaccccgtctctacttacaaaaaaaaaaaaaaattagctgggcgtggtggcacacacctgtaatcccagctacttagaaggctgaggcaggagaattgcttcaacccgagaggcagaggttgcagtgagccgagatcgtgccattgcactccagcctaggcaacagagtgtgactctgtctcaaaaaaaaaaagaaagaaagaaagaaattaaccatgatagaagtttttatgccatggatataaatcagggctttcttttctttctaaacagccaattcttaaaatatttaccagcataccactgaaaccaggcatcagtagtttttgaatatcctcaggtgattccaatgtgaagcacagtctggaaaccaccactgtcttagtcttttccaaataatgctcattgtagtcttggataatttggtttcacctgctaaccctagcaatcaatatttaaggctgtggctctctaatctgggaccactgtctctgcggactttcagcgaggacaacctttattctgccatggaggctgagctctgtaacgtggtatattggggtggataggtggtaattttgtgtatggttcattgctgcccttttgatgaaaagtatcttgttgtatttggattctaagctgaaaatagatccacagaatattgtctgtataacattatgaaacattcctcattttactgctgtgtccaatgcatgtgagttatactttcatttactaaggcttaagaagccaaagtaataaagggcacctacaaatgttaagcataacaattttgtaatctattttaaaattttcttttttaataactttaagataaaatgttcaccactcatctaggaagaaggaagtttgggacatcgtctgactcacatggccaaggacatgggtcagggctgaggtttggtcctggggtttggagctgggataaataacccatccagggactgaaaaatggagaggggtaagatgaggccaacatcctgagatacatgcaaagggaattctcctggggctcagagcctgtgttgttaggatgggaagaggcccagttgtaggggaagaaggaccaggtggtacgtgaacttagatttgtctggcctcacccagtccccagcttgttgccatgtcctgtctctatcttagttgctattggctccctgactgattcttccactgtcttgtctggcttctcttgttataccttccagtagctgatcctgaacatgcacgttgtccttcagcaataccaaatgcctatgaggtttgtagccttgctcccactctctcttatcgagcctccacctttgctttggcattgatgactttatcccctgtcacgaaactgatggagggactgtaggggctcagaaaaatggatgaaggaagatgggagaagcattttacaatttactaagattaaagtatcacatctcatctccccaaccaactccccaaacagaagagcactggaaatagagataccaggaaaataatgacaagtaagcaacacacagaagtgaggaaagaggccaggtattgtggctcatggttgtcatcccaagactttggaaggctgaggcaggaggattgcttcagcacagaagtttgagaacagcctgggctgtttctctaaaaagaaaaaaaaagtgaggaagggaactacctatcccaagtggccactctgtgtcaggcattgtgctagatatttcatatagtaatatatgaccttagttaattttctcaatattaccttctactgcaaaataggtgttattatacccattgaacagatgaggaagcatgctcaagtgtctagtgcccaaggtcagacagctagaaagtttttcacggcatcacataaataagattatataaataagagtgtatgtttcaaataaatattgcagacattgaatgtctaaattcttcaggggagagagagatccagagggacttgtatcaggaaaaatgcttcatgaaagttctgaggctacagcccagtgcagtggctcatgcctgtaatcctggcactttaggaggctgaggcaggcagattctaatgagcaacaaggcaaaaccccagctctacaaaatacaaaaaaattagtcagctgtggtggcacatgcctgtagacccagctactcaggaggctgaggtgagaggatcacctgagcccagggaggtcgaggttctcaaaaaaaaaaaaaaagacaacaaagaagaagatctgaggctccaagagcaaagccttaaaagtgagtagaacttgggtagaagaagaggtagaaagataagccaggcccgaagcatggagacagagaatggacgtagtgtgacccagaggaatgtgtgtgctaaaaggtcggaggtgatcctcttgccttctgctaacagttttgggtaagaaatgttaaaaaagtatcatgcacccagtgagggaggcccctggctgccaggcttgaaagggtaagaattctctgcctgtccttcctggtactccatagcatcacttctttgccccttccctccagctgtgggttacagtgggaagtgggccagccccagctttgtcactcacgagatgtgtgagatttgataaggtaccttgacttcccgagtctgtttcttcatttgcaaaatgggacatattgacgattgatcacatgagataacaggtgttgagcacccagcactgttgaatgtgagttgctccttttgtagtcctttaatattcctgggcctggcccaagttctgcaaagtctttgcagacaactcatggggtgagccagttcttggaagaaagggaagatcacctcccacttcctgcacattatattcctgcttatgcattctgatgtcctgcttgcttttttaggctctaagtgctatcctgctgactcacttccgacttctcgttcttcatgctcagctcctgaaaatggaacaaaatggaaaaggccggaaattgtactgtctggtgatgtgtttaaggggccagccactccacgtggatggaatgctggggacatgaactgagtggtgcccaagatgatttctccactggacacttgggacactttgccttcgattgtaatacctgtactaataataaccatcccacttactgctagcaagccccaggctatgtgctttccatggattgtctctttgaattatcacaactgcatctgtcagggaacctctctattttacagacaaggaaatttttcacactaagataggttaaggaacttgcccaaggtcacatagctggtaagggacagattaaggattcaaacccatgatctagatttgggctgtctaatatagtagctactagccacatgtggctagtgaattttgttttcctttttttttttttttttttttagataaggtctcactctgctgctcaggctaaagtgcagtggcatgatcatggctcactgcagcctcaacctccctgggttcaggtgatccttccacttcagcctcttgagttgcagggactacaggcacatgccaccatgcctggctaattttttttttttttttttgatagagatgaggtttcactatgttgcccaggctggtcttgaactttgggctcaagcgatcctcccaccttggcctcccaaattgctgggattacaggtgtgagccatcacacctggcctcttttaactttttagtgtgactactagaacacaaaatttcatatgtggctctcacatttctctaggacagcactgatctaaatcatgaacattatttttttttattatactttaagttttagggtacatgtacacaatgtgcaggttagttacatatgtatacatgtgccatgttggtgtgctgcacccagtaactcatcatttaacattaggtatatctccaaatgctatccctcccccctctccccaccccacaacaggcccctgtgtgtgatgttccccttcctgcgtccatgtgttctcattgttcaattcccacctatgagtgagaacatgaggtgtttggttttttgtccttgtgatagtttgctgagaatgatggtttccagcttcatccatgtccctacaaaggacatgaactcatcattttttacggctgcatagtattccatggtgtatatgtgccacattttcttaatccagtctatcactgttggacatctgggttggttccaagtctttgctattgtgaatagtgccacaataaacatatgtgtgcatgtgtctttatagcagcatgatttataatcctttgggtatataccgagtaataggattgctgggtcaaatggtatttcgagttctagatccctgaggaatcgccacactgacttccacaatggttgaactagtttacagtcccatcaacagtgtaaaagtgttcctatttccccacagcctctccagaacctgttgtttcctgactttttaatgatcgccattctaactggtgtgagatggtatctcactgtggttttgatttgcatttctctgatggccagtgatgataagcattttttcatgtgtcttttggctacataaatgtcttcttttgagaagtgtctgttcatatcctttgcccactttttgatggggttgtctgttttttttcttgtaaatttgttggagttcattgtagagtctggatattagccttttgtcagatgagtagattgcaaaaattttctcccactctgtaggttacctgttcacgctgatggtagtttcttttgctgtacagaagctctttagtttatttagatcccatttgtcaattttggcttttgttgccattgcttttggtgttttagacatgaagtccaaaacctccttaagctaataggcaacttcagcaaagtctcaggatacaaaatcagtgtgcaaaaatcacaagcattcttatacaccaataacagacaaacagagagcaaaatcatgagtgaactcccattcacaattgcttcaaagagaataaaatacctaggaatccaacttacaagcgacgtgaaggacctcttcaaggagaactacaaaccactgctctatgaaataaaagaggatacaaacaaatggaagaacattccatgctcatgggtaggaagaatcaatatcatgaaaatggccatactgcccaaggtaatttatagattcaatgccacccccaacaagctaccaatgactttcttcacagaattggaaaaaactataaagttcatatggaaccaaaaaagagcctgcattgccaagtcaatcctaagccaaaagaacaaagctggaggcatcacgctacctgacttcaaactatattacaaggctacagtaaccaaaacagcatggtattggtaccaaaacagagatatagaccagtggaacagaacagagccctcagaagtaatgccgcatatctacaaccatctgatctttgacaaacctgacaaaaacaagcaatggggaaaggattccctatttaataaatggtgctgggaaaactggctagctatatgtagaaagctgaaactggatccttccttacagcttatacaaaaattaattcaagatggattaaagacttaaacattagacctaaaaccataaaaaccctagaagaaaacctaggcaataccattcaggacataggcatgggcaaggacttcatgtctaaaaccatgaacattattaaatgatcatcagaccaatgatttcccaatgtttttgataaatttttgagcacaactcctcaattgtgtattcttatttattcataaatgttatacatttgtgctactctgtaatattatgtacattataaaacattgacaaaatggatatttttaaaagatgaaatttaaaaaatgaaatagaaattgtactaatttcttccaggagcctagtgggtcactttgtgcaccccccaccatggtgtgcacacaccattttggaaattcttgcaccagagagacttagagctcctgggggcagagactttaatacagatgatccctgacttaggatggtttgacttatgatttttctagtttaccatgatttgaaagtgatgcccattcagtagaaagtgtactttgagtcccctttcaatcactctgctttttttttttttttttttttttgagacagagtctggctcagtcgcccaggctgaagtgcagtgacgtgatctcggctcactgcaagctccgcgtcctgggttcacgccattctcctgcctcagcctcccaggccggctaatgttttgaatttttagtagagacgaggtttcaccacattagccaggatggtctctatctcctgacctcgtgatctgcctgcctcagcctcccaaagtactgggattacaggtgtgagccactgcacccggcctcaaccattcagcctttcattttcactacagtattcaataaattatgagatattcaacattttattataaaatagactgtgctagatgatcttgcagaactgtaggctaatgtcagtgttctgagcacgttaaggtaggttaggctacgatgttcagtaggttagggtattaaatgcattttcaacatacgatgggcttatcgggacacaaactcggccaggcgcggtagctcacgcctgtaatcccagtactttgggaggtcgaggcgggcggatcacaaggtcaggaaatcgagaccatcccggctaacatggtgaaaccccatctctactaaaaatacaaaaaattagctgggcgtggtggcgggcgcctgtagtcccagctactcaggaggctgaggcaggagaatggcatgaacctgggaggcgaagcttgcagtgagccgagattgcgccactgcactccagcctgagcgacagagcgagactccgtctcaaaaagaaaaaaagaagggacacaaactcatcatgagtccagaagcatctgtacatctatctcctctcccccacagttgaagttagcaccatgcctagatataattggtgcttaatacatgtttgtggaaggaataaataactcttaatgtacaattgttttctcgtggattagattaatttatttatttcacatgtatcaagcactttctatgtattattatagtactatactaagcgctgaaaaagaaagtttacaaagactaagctcctttactctaggcctgtgcttcttaagctctagcgtttgtaagaatgacctggagagcttgttaaacagattcctcctctcctcctccaattcttattcagtaggtctgaggtgaaaccagataatttgctgaacatctaagaagcttttaggaaactacactttggaggagagtgctgtgcattggaaaattggaaacatctcaaatattacatgagggtgagtgttgaagagaatttatattgcattttcactatttgccaagcacgtttaaatacatcacctcatttaaccctcatatagacctcatgagtcatgtattatttcagttgaggcaactgagattgagaaaggttagttaagttgcctaaactatagagtaagtaaatggcagagcttgggtttgtacccacttctgcactcagtaattcaggcaaatctgtagcaagtgtcttcttttttttcaggcactgtcctaaggaactgggcatacaacattgagtgagacagacaagctctctgtccccggtcaaactcaacaagcacttaaaatatcgatatgagggaggcagtgtcatggagatatacaacagaaacgtatactctagaacagagttagaactttccaggaaaaaaagtaaaatttacacgaagacctgagggatgaattagagcagtgaaggatgagcgggaaatgttttgggctgaagatatacatgaaggcttgaaagcattcaaggagctgcaggaagttcagaatgtctgaagtgtggagtggaagggagagataagacccttgaggtaggtaggcaggaaccagatcatgccaggctatttaggggtacagccagcctttttttttttttgacaggatctcactgtcacccaggctggagtgcactggtgggatctcagctcactacagcatctacctccctggctcaagctatcctcccacctcagcctcttcagtagctgggtctagagacatgtgtaccactaatttttgtattttttgtagacacggggttttgccacattgcccagactgatcttctgaactcaagggatccacgtaccttggcctcaccaagtgctgggattacaggtgtgagccactgcccctggtctcagatttgtatttttaaaaatttactatgcccccagagggggatggatcaaaggagagctagcttgcaggcagggaaatggttaaagatgttagtggtgtaaatttgggtaaatgctgtgtgactgggaagtagcagaagtgagggggatttaaaattgtttaagacttgatgattcagcctgggcaacatggcaaaaccccatctctacaaaaaaatacaaaaattagccaggtgtggtggcatgtgcctgtagtcccacctacttgggaggctgaggtgggaggatcatctgagcccaagaggtggaggctgcagtgggctgtaatcatgccactgcactccagcctgggcaacagagaccatgtctcaaaaaaaaaaaaaaaaaaaagaagacttgatgactgatagattggaagggacaatgtggacaggcaaaggagggatcgaagatgacttccaagtttttgagtaaactatacagtttcagtagggataaggttctgtaagcttattatttcacattttaaaggaagggtaaattcagataaatgaagtgatggaaagatgctattttagtaagatttcaatgacagaaacttacttgatagaaaatatgggagaggctggaggcggtggctcacgcctgtaatctcagcactttgggaggccaaggtgggaggtgggaggatctcttgagcctaggaatttgagaccaacctgggcaacatattaagaccctgtttctaaaaaattaaagaatcagccgggcatggtgatgcacatctgtaatcccagctactcgggaagctgaggcgggaagattgcttgagccgggagttggaggttgcagtgagctaggactgtgccactgcagtctagcctgggtgacagaatgtgaccctgttaagaaagaaagatagaggaaaattattatttttgtggtcaagtttactttttttgttttaatttgcaccaacagctttatcatttgtcgacagtggagttctgaatgccagagattcctcctctttttgccaagatcaggattaactatggagaggaccggccgtagactacgaactgtcagtctactgagtttctgtcagtcttttgagtttcctttgtcttcttgttgagtgaccttggaccttgagtttctgaagctcaacattccctttttcttcccctattttttaccccacactttacatcttaagtgggatattggacatctcggatcagtggaccagtgatgatttggactccgccttcttcgtctaggtcccgcccactttaagaccccaccccttccctaagccccgccccttgaagaggttgtctcgatatgacagcaaattctccacaatcctgtcctataggagatctaaagggtgggacttacatcaaccttttttttccatttgttttttcaagtgtctatttggcccaggttccatcccacttcattttcaacccaaggattggttactctgttctttgtctctggctcatgattggttctttcgttccgcccctctcttccagcttttgcaggcgggattaccacgcagcttcctgctcctgccaaaaaaaaaaaaataaataataaaagaagaagaagaaaagaggagagaggcgaaagaaaaatgtcacaaagatctttgctttttaattggctttaagccttgtcggtcaagccaaactctgcctttgattggtctttctatctgcccatcccggatcgggggcgggatttccccggaagacccacaccttgttgccactggccgaacagtgcgcctgtctgaagctcctggcccaggattggaggcggtggcggacaggtgggcgtggattggctagggcagccggtccgtgcaaggcgggggcggggcctcggcggctggttgcgcgtgtccgacgctggctccgctctatccggctttgctaggggaggtgagtccggccgcggcggaaccggcggctgaggaggcggcggctgaggagaaggcggccgcggcggctgaggagaaagcggccgcggggacggaagccgggtgggggggagggggggagacggagcagccttgagccctgcggggccgttgcgcgggggacccacccgctctcccccccaaccctcctcagcagaagcagccggcggcgggggcaggagtcagcccgcttccgaccgtaccccgcccgcctcccggggctcctgttctttggccccgggaccctaaccttctcccggggcggttccctccgtctgggcgtccgagcgctgcccacatctttcattcctccctgcacctccttcccttcacttttgccccggctctctttctcctctctgtcctgctgtcgcctcctctcctcactccagcctccttccctggcttattctgcccaggaaagtttggaacccccgccccccctccccaatcaggtcaacctgactaggagtagggggagatgtaggaaggcctgagagttcggggggggggaagctggaagctggtttcccagaaaatttccccccatcttctccatttagggtggtgggaattttttttaatcctgtttttgaggaggtggtaggtgtttagaaaaggatgtgggaatggaaggggtagatgagtcaaccctctttcaagattccaagggtggtgtgttacctgatccttttcgtgtgtggagttcagggggtcgggaggtttggcctttattcccacattcaaagttggaacctcccccaaattaagaatggagttttagtacccacttgtggcaggaatcctggggggaaggggtccttttttcctttttcttttcttttttcccttttttttccttttggcaacccacacccttccacacacgctcaccccaaaattaaacaccaagatcctctaacttgtttggattgactgatgaagacataaagctctatgttttttgaggtggagtgagtggtttttcttcatttttaaatggccaaatgacagcttgacccagtttgctttccaatcaaagggcatttattttgaatgtctctttgtggcgcaagagccaacgcaaaaatgatggcggcttacaatggcggtacatctgcagcagcagcaggtcaccaccaccaccatcaccaccaccttccacacctccctcctcctcacctgcaccaccaccaccaccctcaacaccatcttcatccggggtcggctgccgctgtacaccctgtacagcagcacacctcttcggcagctgcggcagccgcagcagcggctgcagctgcagccatgttaaaccctgggcaacaacagccatatttcccatcaccggcaccggggcaggctcctggaccagctgcagcagccccagctcaggtacaggctgccgcagctgctacagttaaggcgcaccatcatcagcactcgcatcatccacagcagcagctggatattgagccggatagacctattggatatggagcctttggtgttgtctggtgagtatccaaagaaaaacacaacctctcatggtttcttctgttggttgtcattggatgagtccatctctaatggttgtctccatgttgaccaaggtgcagcaagcttctcaacccaactgtaggaagccaccctcacttatgtggtaaagaggcctaatgcattggctgtctaggctcatggcaagttttggtggagcgccttctcatgagcaacacacataagtgtgctgtctaccaaacttttctattagaacctaagcaagccactgaacacaggatcagtagatgaatgtatgcaatactaattcctacgaagaccttggtcatctcgtgtgtttgattcagtggccctgtggcattaagtgttagcacctgatccagactgaattcctttataatactcttgtcattaggatatactttgcataactactttcctgtcctttctgtcttttcacttattttgtgatcttgatctccagaagaaagataggattcatagttgaaccagttaagatcattgcttgagtggtttattttaaaccataaagctacagttgagaagtatgtagctgtagccttttgataagaatgcattaaatatagcatcacacatgagtaccacaaatgaggttagtagactagctatgcagtggcccacattcagtgtaatgttttagtgtcatttagtgcctcttaagttgctgttatctgttggtcagttgctgtagtaggaaataatacttttttaacaaatgaccctacctttgctagtgctaggatatttgtaaaagcctaagggcttcttaaatataacattttggtctatttggtctaaccttagaaagattagtagtttataataaaatatgtttgttcctatcaaaactagaatgaactgggttttctcccaaggactaatgattccactttggatagatgaattgatattttcagtgcattcaaaaattgttactcccgagaaaagcgcccattaccacaggaaaatgaactctttggaactagcccggtaaatatctcctttcgtcattgtttttgaggctaaaattgatgggtgcattgtttatgcattttaactggccatcttatttatatttcagatttgataatctaggctgctaagtgatctcatccattttttaaaaaaactagtagagtccagtgttttctcagctagtccccaaggaagtttctgctgcagcgtggtcctttcttcaaggtgtgtgggattcaaggtggaaaagagtatagctggtaatggtgccttggtcattctgctcagggacctgcctgttcctgccttcctctcttcccttccacagactatctcagagatttaactgtgaacttatccttgcctaactcttgaggatttccaagctttggttgggggatggaacagacaggaaaacggttgttccttggtttaaattttgtcattgatttactaataacttttagcacttgtttggatcttcttagatctggatgcttactttcttttttagtgccttacatacaatgctaaaaactagggatactgaaagggaaatgggttgcagcattcttgaatatattcaaaaggcatttttcacttacatttctatcaaaaagtgatgtgacttgtagcagtttttattttatttatttatttttttaaggaagggggcaataaagaactggagtgctgaaacatctcacacagcaaacgttctgctagtgggtactatgaatctttgatatctgaaagcccacatatatttggtttgaagccattctagaggtttttaattgattgactgctctaccacctatggagtttgtctcatgtacttaaagtacacctctgtgcaccatcttacttcaggtttgtcttgtgtcactgactacattcgtaagccccttgagggtaaggattgtctactgtagtaatccttttctcctcagcgcctagcacagtgctttggcatctttgctgcttggttaattgatctagtcaggtccttctttgttttggcttaaacaacagaaaattatttctcacagttctggaggctagaaatccaatatcaaggtacaggtttggtttcttttgaggcccctctgcttggcttgtggatggccgtcctcctgtgttatcacgtgattcgggtctttgtttttttaaccaagtttttctagttaactgcattgagtgttttcatcagctgttacaggtgaaatacaatttggtatgaaaaaggaaagagttccaggtgtatgttttagtatgcaaatgcttttctatttttatatttacatgtcaatgacttgctgtctgaattccttattatatttgaaatttaactgttgtatgacctaagtaagactgtttagagatttgaaaaccaaactaccgggaattgcactaatattctgaaacccaaggtaaagatattagtgaggttttttactttttaactgaaacagaatgtatctttttaatttaggaagcaccttatgaattggaaacaacttttttctaaaatgattataatggaacataaaaatgttctcccagtgatgcatcctttgattgaaaccgccatgtaactaactaccggggtattataagattcacttaattcaaacatatattcatttaatgcactttgcaagtattcttctggaatagcatatgacaagaaactgtatttgcccacatttccttggggacatacacccaggggtactaactgatggctaaaaaagtggcatgcaattttgagagagattgttgtttctccatgtagacaaggagagatatttgtagaagtgatgcagcattttaccagatttatcactgaacaatttagtctagctgacttgatttatctttctgttgaatttaactagtggaataacttatcagtattggacagttgtgtaaaagtagtgaattactcattagcttgctggtaaggatggtgctgtgacagttcaattaaggtttcattaacaactgtctgctgtattttatctcaaagtaagagttccagtttacctggtaatgtgattgtgggataacctgagataacatttgttgccactgatagaatgttgtttatgggttatcaagatatcatatacaatttgaccttctttttgagacattacagcctccaaacacccacatggacattttcataatgcaaaaacaaaacacaaagcaacccacaaatagtaacttcagtcatttggtgagtaatataaatctacctttttgtctgcagttcacatttgccagaggaaaatgctgtggttaaagatgtaacaactttgggacaaagagtttcaggggctcataattttgagagatggaggaagttgaccgcatgagagtggtttgaggatcgctgtgcctagaccgtttttgacattggcaacttaacatatcagagatggaattaatggcacatattgccaccttggtaaaagtgagtctgggaaaagacttttttataaaattagcattttggtttgtgacttgcctgattaattaaaagatcaaaaatcctgggattcacttgctctgttgcctttgtgtactccaagtaatgttggaggtctttgaattttattattctaataacttcagcaggttacttttatctgtctttcaaaactgtagtgatagttactagctctgtgatctcgataaattatttgacttctctgttcctcatctataaaatggggataataatagtacttatctcaggattgatgtgaagattaagtgaggtaattcttgtaaaccaatgattacactgtctagcacacagtaagcatcaataaatgttagttgtttttattgtagttattgttggtagaaaaatcaagctgttgtgttaatgtgcatggaagtgtcttcatagattgtcagatttatcaggtgaaatcagcatgcagactatttttggaggcatgactctaaataacgtagcgtgtcccctcagttgtactgtatgtcagggagatttgaaaatggttgaatttaaagccaaggggaaaatactctgtgctgtcctgtcaactaattaaaaacaaataaaaataatacacatttgtatggactttgtaggtgttttagtcagatcatctgcactgttttagaaagtattatggatttatatactgggaaattaattttttcttttcagaatgtaacaaatgaaagacatccttattgtcgaagtagagattcactttgcttatgtttggatgaaaaagtgtgaattgctaaagatcccagtgaggtgggagaaatatagtgatttaacaaaaaaattactcagtataagcccttgtgcatggtagagattgtctagcttgctcatcttgtgaacatgagaggcatctttttttcttatgttttgtctggtcctcttactccacataacaaactaatttggaaaaatgcagaatgcttttgggatatgtttggggaaaatcctggagtaagttgcatcagaaagagtagtatactaaagggtattttgttattaactgtgttttacaggttgagaatctgtagtactgagaagtttctccactatcagccgagattaacagccacagctggattctttgggggctctgctttgtgaaaagagctttgaagaagcagagcctgcaccataaaaaggaaacggttgctcttctagacataacaaagcatccgtatgaaactagaaatgtggaaatctgtattgttaattttaactacaaacgaacttacttttggaaattacaggttcatgatcataaagtagataaagagtagagaataaaagtaacaatctgatgattctgcacccacttcttggtggttgaaactccatagcctataacgttgcaagtcattttgtacttagactcctgaaaagattatccaaattatgttcaaaaaaccacagcacaaaaaataaacttgttttattcttggggagaaatttcatgttatactgtccaatattaatttagaaaaaaagacagtttttttttttaaggcatttcagaaacattgccctttcaagcaagttagaacaatatccctcaacattaaataccatctttttagccatcagtaccactgggcatgtgtcataaaagagaaatgggggcagatatagctccctttcatatgctataccagaacaaaaatttgtaaaatgcataagtgcattaactgaatatgtttgaatttaaattctgggtttttaccttcaaagcacaggcagctgtagatacaaaaagtcctctaatggagtactggaatgtttcattgtcttcacaacttggagtgtcagagttttctctgccttctatattgtaaaactgagtgactattcttggtcgtttttattagatttattgatgtccaagcaatacaagaattaactgttcatatactgtatgtttccttaacatgcttatttggtttctttgatggagattgtcaaggccaaagaaactttttcatttgtcatccaaccaataaatggacagaagctgttagaagctctttaattatgcgtctctttgggttttaattctgagtccctgtgcctctgtgctactccagtgaattatttgttgattgggccatctaatacaggtcaacaataactaaaatagcttgtcagtgtgatcctgatattgcttggaagtaacagagtgtctgaggcaacagttgtaacactgtcagtgagcacataacaagtcatgatagacatagtcagtagttgtaaggtacctagtgcagaaacagaaaaaactggtactctggcattatggaaagatgacttctaagtgaactctactgagattgaactttaactcttagttgtaatggtgtgagtagagggagtatatatggggatgtctgccactcataatgattggtgctctttacctaaacccagttttgaaataatttggctaattgagtcatatctactatgaggcagtgaaagtttttaacacctttggaactcactagtctatatatttttattgtcacttcgctgtggaccagcacttttgcaagcaccaaatggggatatttagtcttataaataattttgcgaacctctattaagctgctgctgctgttgtctgtattgtgcttagtactgaggtatagggatgtttaagtcaccatattgctttggaggagttgacagtcaagtaaacaatatgaacaatgaaacatgcctactctcagggtgtcctcagccttggtggagaggtgaaactaaatttgaaaccattaaataaaaacttaagaatatattattttcaggccaggcatggtgtctcacgcctgtaatcccagcactttgggaggccgaggagcggttcacctgaggtcaggagttcaagaccctcctgaccaacatggtgaaatcccgtctctactaaaaatgcaaaattagctaggtgtggtggcacatgcctataatcccagctacttgggaggctgaggcaggataatcacttgaacgcaggaggcagaggttgcagtgagccaagatcgtgccgtttcactccagcctggacaacaagagtgaaactgtgtctcaaaaaatatatatattattttcacttgttcttacaatattcaattattgtatgttactatttgccaggcactgtgctggagataaggattaaaggtgattatgacctactgggtgaaatagatttgtaaatggattattataattcattgccataaatgcagcaatagagatagtccctggacattaagggcgtgtagaggagggatttctatggaaggtcaggatgcttcctaaaataggtaattcttcaatgagttttaagaatgagagtcaaccaatggggaagggcagtctaggtggaagggcctatatgcaggagactacagggctggagatgctgaatgtgcagtgcagtgggtggtaggaagtgtaagctagagctcaatcatgaagaggttggaatgtcatgcttgaggcactaaaaacagctttttattaataaagcatatgtggacatatagcacataaacagttaaatagcatatctgtggtattaagattttacgaggggatgattaggaaaatagcctaaaaaggctccgtaggcgggcaatgatgagaaaaggttaaaactgcgaatggcaactactgaaagtttttaagtaagagagacttcgtcagatttaatttttttttttggatatgtaaaatagaagagtagagagaactgagatctgtctgagtcttagggaatgttctcagttgtaggtggaagaagctactggaagcagaactaaagggcagttaggaaaatgtgttcacaatgattgacaatctaagtatggcagaagattgttaggaaaatgggagtgatctttggtgctgataaaaagtcaaagaaggccggccatggtggttcacacctgtaaacccagcactttgggtagctgaggtgggcatatcacttcagcccaagagttcgagaccagcctggacaacatagtgaaatctcatctccactaaaagtacagaaaaaaaaaattagcctggtgtggtggcacgcacctgtagtcccagctactcaggagtctgaggttgcagtgagctgatatcacaccactgcactccagcccgggcgacagagtcagaacctgtctcaaaaaaaaaaaaaaaaaagtcagaaaattaagatggagaaaaggccaaaaggccattgtatttagcctgatagtaaatagatcattgatggcatttgagagagtgattgtgtttgattgattctaaagaatgtcttaagtattcagtattactttttacaattttttaaaattattaatacaattcttccaaatctcatttgtttgtttgtttgtttgtttgtttgtttttagtttaataaaccagagaacttgatgttcaaggtgccatttccttgggaaggatttttttttttttttgagacagagtcttccgctgtcaccaggctggagtgcagtggcatgatcttggctcatgcagcctccacctcccaggttcaagggattctcctgcctcagcctcccgagtagctgggattacaggcacgtggcaccacacccgcctaatttttgtatttttagtagagacggggtttcaccatgttggccaggatggtctcgatctcttgacctcgtgatcggcctgcctcggcctcccaaagtgctgggattacagttgtgagccactgcgcccggctttttttttttttttaaacaatggggtaatagattactaaactaaacttgttaggagacaaggttctggtcctagccttgctgccaacaaccctgtgaccttggtaaagttatttaaactttctgagccttggttttctcatttataaaatcctgtgtttcctaagattctattataaaatgatattaatatttgttggagtttgctggtgaccacaagacaactttctctcttcaggactacagtgttgaatagcttctaaaattgtttaaaggaggaatgagataaatgtcaccctgttccagagtggtgacttttatagagttttctaatttgggattagattttaaatgttcatttttttttcatcaagagacttgttttcttctattactgagttattggtaaggattatacatgtagttcagctgtggagaagagcaggcctgtttgcaaatgagcaatttcttctacatgtccatttgatactactattttcctgataatatttacctttttagtgttttagactttaaaaacttgcttagtttcttataagtcttacaatagttttcttacaatattttgagtgatttttaaatttttaaataaaatttaatgttcagtattttgtcatcttttgtgtgtgagtaatcaggtaagatgatttgggagccagtgcttacattaatttgcaagtttctttaaaacaaatttctttccaggagtctcttttaaattctgaatttggataagagagttactagtttgcatgtgggcctcccagaaaatgagctttgacacagctttcaggctgtagtagtttagggcttacagtgcccaaagagggagagtgacttcctaaagctcttgtccaagaggaagggagcatttttgcagacaccctcagcaaaccagcagtgctatccagtaaatacatagtgaaagtatgcaatcttaaattttctagtagccacagtaaaaaactgaaaagaaacaggtgacattaattttagtaatgtattttaactctatatccaaaatattgtcatttcaacatgtattcactataaaaattattaatgatctatattacttttttttcatactgagtctgcaaaatcactatgtatcttcatgcttagaatatgtctcagtttggtctaaccacattttaagtgttctgtagccacacatggctactgaccagcaccagcatattgatctctggtgtttttttttttttttttttgagacagtcttgctctgtcaccacacctggctattttttttatttttttgtggagatggggtctcactttgttgcccaggctagtctcaaactcctgggctcaagcagtttgcccaccttgacctcccaaagtgctgggattacaggcctgagccaccgcacctggcctctctttggcttttgttggattacatactcatttctgaaccagtcactgtcaatgaaggtaagattacttttggagcaatcagatccacttctggacctggagatggagtcagttttaaatgggagggatgaataccagcagtaaatgccaggaatgcagtcattaatgaccaagatactgcatttgtctgacttgtgtcagactcagaagaacttgagtgggtatatttatggaacaaactggaataatgatctctatagagaagtcctgtctgtcctgagttatttggaggcatttttccttttcttttctgaagctttgtttgcctaaagtagcagaaggtaaatttggtacctgatcgttgccatgtttgctttccttcccagttagagcagatatctcctattgatttctctttttatcctctccgtattgtggttttgttatctggataaggttctcagtcttgttttcaatttaagtagtatagagctcagtagtgtcaggcagcagacttcttacaggggaatggacaacacagaaactttttgtttatccattctttgacctaaaattcttgctctgagctacagaaaaaaggtgaaaagagacatttgaacaaatagataaaattagtcatttgacccagattgcagcttttcttcctgtctgcatggataaaaatgatccgtcaatttacataagcaggtgatttttcttacatgctaattttcttaatgtaccatggcagagagttgcagatttgcaaattgtgtaagttaattgaaataagccaggtgactttatttcactgtattatcttaccagtacaaaagtacccaaagggtacaattatcaggtgattgtctcattgcacatctaaattaacatgcagcctggtgcagagggtttttccccactttcttctccacttccctctcttttctaattttttaaaataggaaacttgatttctatatttacttcaatagagctggaaatttagtaatacagatgcggaggaaatttgagctttattaaaagtaatccagaagctataaaaattggcaagtaatgtggttattgtgcagaagaaggggcttggtttgggtttgaattgcctcagagaattatgtgagcatcttcaaccatgtttaattgattggcttcctctgtgttcattttcccaggttctgcaggttacagtaattggggttatcctgaagttaactgggtgtataccatagccagcgttcaaagtaaatattgacaggcattcttttaaaaacacaagctaattaattataacactgtttaaaacattttaataaaattgaaatttttgaaaggtgcaacagttggttatagggattctttgcagaagatttatgaggacaaataatgtcgaccaacaaagcacctttctttattaagactttcaatattaaacttaataattaatgttacttaatttctcagatgttataatattcacttagtgatatatacagggattaaattatactccttatagctttgaaataatgatttggaaaagaatcataattttaagctagtaaaagttgggccagtcttgtttcagtttaaagaaaaataatttacaggaacttttagaacaaaagcagttaaagaatgacctgaggagaacatttaacatttaaagggatagtatgatttagtagtcaaggctgggcgcattggctcatgcctgttactccagcatttgggaggctgagaccagaggattgcttgagccctgggctttgtagcaagagctcatctctacagaaaataaaaaataaaaattagctgggtgtagtggcacacactttcagtcccagctatttaagaggataactctctttaaatcctagctctgcccctcattatctgtgggtaaattattttatctctatgtacctcatggtcttcatgtatacagcggagatagtaatagtattccagtaattgtagggttgttgtggggatttttttttcttttttttttttttttgagacggattctcgctctgtcaccaggctggagtgcagtggcgtgatcttggctcactgcagcctctgcctctcgggttcaagcaattcttctgcctcatcttcccgagtagctgggactacacgcacacgccaccactcccagctaattcttatatttttagtagagacggagtttcaccatgttggccaggatggtctcaatctcttgacctcatgatttgcccacctcgggctcccgaagtgctgggattacaggcatgagccaccttgccaggttggattttttttttttagtatagtggtgccttgaactcctgggctcaagtgatcctcccacctcagcctcctgagtagctgggactgtaggtgtaacccactacacccagctgtttttttattttttaagaggtggtggtcctgggagtcttgccatgttgtccaggctggtctcaaactcttgtcctcaagcagttctcccacctcagcctcccaagtagctgggattatagacatgagccactgtgtctggctgttgtgaggattaaatgaattattatatatttaaagtcttagagctatgtttggcattatgtaaatgttagctatcacaattattattactggtttcagtatgagtgaaaaaaatagtacctcatgaaaacttactaatttagggaaaataaacagcttttgtgtgatggttgacaggtatcaggtatgtgacttcactagagatttttttctgattaactccaactgtttttgaaaaattcattcaaattctagaatgctttccaaatgtaaaattttctttagcacataaaaggaaggtttttttctttgtttttcaccctcctccttattatcagagtaatagtatgtttattgtaggacccttgaaaaacgcagaagagctgaaaggaaaaacagttgtttgtaacctacaactcagagataaccactgatagcattttggtgtattgtttacaagactttgacctggtatgcgtgggtgtgtttgtagtattatttagagttgggatcatgatcacactgtatttacaattttgtatcctgtttgtttcactaacattgcagaatgagatttcagtcatttgttttgagggctttttcattctcacaagcctagagctctgcctcaaagaaactagagagttggaagatactttagaatgcgtctagtctagctgcctcattttataagtgggaaaattgagacccagagaagctaagagatttgttcaacgttgcacagctggttgggggctgagccagagtttttgctgttttgctgctttaccagtaatacctgtccaactaaatgcctattgaaaatggaggaagtgttcttacaaaaacaaaacaaataaaaaatgaaaactctatataaatgaaaccaggaacgtgcatctgagaaaaaccatggaatatttagattaatctgttggttattttgtgtgggccagtgactctgattaaatgttttctgattaaatgtcacagactacaagatttttggtgaagaacaactcagtcttttcatgttatatgtaactaagttgtatatctattttgagcatatcattcttccacctattttttgaaaacttttaaacctcaggaaatttgaaagaattgtatgatatatccaatgtaactaagttgtatatttattttgagcatatcattcccctacctattttttgaaaagttttaaacctcaggaaatttgaaagaattgtatgatatatccagaaactgcactcctagatttcttctcaattaacattttgtgacttctgcattacctaccttttttttttttttttttttttttgagatgaagttttgcccttgttgcccaggctggagtgcaatggcgcgatcttggctcactgcaacctccgcctcccgggttcaagcgattctcctgcctcagcctcctgagtagctgggattacaggcatgcaccaccacgcccggctaatttttgtatttttagtagagagggggtttctccatgttggtcagcctggtctcgaactcctgatgtcaggtgatccacccgcctcggcctcccaaagtggtgggattacaggcgtgagccaccacgcccaactgcattacctactttgaggctatttctacagaatttgcggaggttgggttatgattaatttaagacttatacagtgttaagaaatttgtggtcactgcatcaactcactgttccatgtaatgaattttgtaagctctccaactagagaaggaactcgaagttttaaagcttgtgactattttggaatgctattcattctcttaataattaaaacaaaattcagtgtaaatcaaatgtgtaaatcaaacatgtaccagtcaaaactgagcttcaggcagtatagaaatattccattctacaaacttttttttgttgttgtggtttttatctcaggttgagacttaagggaacattttcaaaatagtgtaagatctggtttcacaattctgtgacagaggacatgattttattgttgaagttaaattttaagttattgtagctttttttaaagtaaattaccctaatgcagtcatatgagctgatgatgctatgatttgtgtcactgctctgtatttttcagtaccaaataattcctttgttaaactcattttcagtaaatgagccattgtttccccaagggtaatgattatttcccctatatatagtacaaagccttgagaaatagatttttaaatctaaaatatgagttaatgattggaaaaggctgaaatcatcactgtgtcaactgtatgtgtgaaaagggcaactgctgtgtttgctgcctaggctacaatataagatactatgtttacaagaaatccaatgacagcaaggctttaaaagtgaggtctttcagtttagatgcaaaaagggtggttctgttgagtcaacccagctatttcactacatagtttcgtaatgtaaacacctagaatgaggtagctggagtgcaaatctaaatggcttgtgacagttaaggaagtacataggcaacagttactggttttcttgatgcagctgatatcagtatcttcaaataaatcactgacttaaagtacctcagcaggaaagacattaaatagggacaccgtaatgtttaactggtataggtgctgaaggtctagttatcaacatctatcagcttgtctctgtaggtgggcaaactttaaataactagtttttgtaccctgattttcttttcctcttaaagtagatactcattcttgaagacaatctgtttctttcaatgctaatgtaagtgcttataaccacttgtgacatgttctctacccaccgatccactaaaaatgatgagagtttcgaagattcgggtcatgtcttagttgcttcttcagagcctagcctggtcccatgatgggtgcctgttggttgctgaattgaaagcttctaggctgggcatggtggcccatgtgtgtattctcagctactcagcctacttaggaggctatggcaggaggcgcttttgagcccaggtgtttgggattttagtatgcaatgattgctcctgtgaataaccactgcatctagcctgggtgacatagcaagacccatctctatgtaaaaaaggaagaaagtttccaatgctgagtttgtatgtgatggtgactctgaaagaagagtaccgtcagcagccaggcgccatggcttacacctgtaatcccagcactttgggaggccaaggcaggtggattgcttgagctcacgagatcaagaccagcctgggcaacatgacaaaaccccgtctctactgaaaatacaaaaattagctggacatggtggagtgtgcctgtagtcccagctacttgggaggctgaggtgggagcatggcttgaggccaggaggcagaggttgcagtgagctgagattgtgccactgtactctagcttggtcaacagagccagatcctgtctcaaaaaaaaaaaaataaagtactatagttggttcttgccattatgtattaaaagatcccgatttcttcacacactggcggaatttttatgagaggacacttgttattatttattattattattatttagacccaacccgatggtattggttttgttttcttatgtttggattttttatttttttttaagagtgagagctctaatctaaaaatagtatatggtaaccaactatgtccagaaatagtcctttattttgaaaagaaatagtcctttatttatactgttttctataatctacataaagttaagaatgctattgaactgtttagggaaatacccttttctttgcagtactgtgatctatgttagaaaaatagagatccagttaatagaaactgtgtccaaagtcttatctaatatatcaaaacataccaaagtagtctgcgatgctagagtagaaaaaaaagttcaattctaagctctttattctgttttataaacgtatgaataaatggcaatttagtgtatactagagatcctttttcaaattagtgaacaaagaatggtttattccagtggtatggtggcatatgtttaacaacaggctctctgaaaaataaaaaagctgtagtttagggtttgctgatctctgtggtgtaaatactataatggccaatttcaaaccactaatgtgaagtcactaaatgctgaattggagaaagatatgcactagcacgcccttatatggtattttcatcatacagataaaataggtgttagataaccttaagagcataaatcataataaaataactagggagtgatgattcctaagtatttgttacctttgttttaaatatgatttattttattctaagtttatataacatagttttttatggttatgtttcacagtcagcttacaaaattccagaaaaatgtaactgtcatgagcagcatgcaccagtcccagcacactggtttattttgttgggatacttagcaagcagtggggaagaataaagtttatattcattatatacaaaaatgaagtccaagtggattaaagattttaagaaacaaagccaaaaaataagaaaatataactttttataatcttggagggaaagacactattgactttaaagcaagaaaagaacatcagatttgtctatgaagacatctaagatgtgtatttggtaaaatataccataaaaaaatgcctaaaagaaaaagcaaaatctagggagaggatattagcaatatatgtgaaaaataaaagttaatatctttaatattaaaagagctctcttttttactttttaaaaatagagacagggtttcactatgttgcccagactggtctctaactcctgagctcagatgatcctcctgcctccgtcttccaaagtgccgggattacaagcatgagccaccacacccagcctaaagagctcttaaaatcaacaagaaatacacttgaagaacccaacagagaatgggcaaaagctagagaatgggcacatagaagaaatacaaattgttaaaaaacattaaaggatttcactttcgttaataaacatgcagaaatagataacacttttaaactgctagatattttaaagtaataatcctagttgttgcagatgtagtgaaacacacacacactcaaattttttatgatagcatggatggatggagtcttgattggagagcagtttcgcaaaattgaatgcacacgctctttggagcaatcattgaccttagatacaaagatatatttataaggatgttcatttactgttatttatcatcctcccagattgaaagcaacctaaatgtctatgagtagtagagtggtcatctttgaaatatacccacaatttattaaatgaaaatctgtatcagtgaccacttaagatggggtctggctctgacacccaggctggagttcagtggtgcaatcatagctcactgcagccttgaactcaggctcaagcgatcctccacagcctcctgagggccagttagttttaaatagactcctgtagtaatcaagttgctgagagttggaggttgatgtacgagtttatccagtttcagtgttttaccattctgtaattctatgagctatttttaaaaggtgtctataaccttaaagttagaagcaaattgaaaaaaagacattaaaagaaaaatggtcttgaacgaacccagagatgatttttctgctgccttagttatgtatgattcaacagtgctagtgacaaaagtagcaccagctaatttgtgtgatatttcaatgtcacttgagtttctaacgtgaatttgagagtaatataagttattacatggtttgtggaggcctcagctgtaagacacttcatggtatctggatgtcttctaaataccacagaatacgaaagtggctaatgagagtctgttattccttaaaactagaaatgcaattttatttccttagaagttttattttgtaacttgaagatagaggagacacaaagaggtcattttgtctggtatactagattaatgccctagtaattggtgatttctacctccagtttttctgtacaaatttctcaaatcattatttcatatatatatacatatatacacatatacatatatacatatacatatataatatatacatatatacatatacatatataatatatacatatatacatatacatatatataatatataatatatacatatacatatatataatatatacatatatacatatacatacatatatacatatatatacatatatatatatattttttttttttttaagaaaacagtgccatcatgtcagctttagttcaagcagttgcttcctcttgctggactttccatccatctaatccctgagctggggttccagacctggaggtgccttctgacacttaaaaaaatgccatgtactttagtggggaaagtttcggaagtgttgcccgttaaaactgcataaataagactgggatattaaagtgtcagaaagagagagcgagagttatagatggagcagcctgttggcatttttctgaggatgtctagaatggtgactccatagtcctcatttagtggcttaattcagacttttattgccctcatgatcaaaagagttctgtgtctaatactaactttttgaccatttcctatcatttggttctctttttcttaatgtaaataccattattgaacttcatataacacttaggaagctgctgaagatgactgaagtttcttaaaatgactgtatagatttttagtccttttaaaaatcaaaacctggaattgtacagtgttttaagaaaacatttttaaaatttactataatgcatgctgttcagataatgatgaaaagtttaatattaaagccatgtgtattataatctgagtcacacaacaaaccataggataaataacgtttttcttttttgagacagtctcattctattgcccaggctgtagtacagtggtgcagtcacagctcactgcaacctctgcctcccgggttcaagcgattctcctgcctcagcctcctgcatagctgggactacaggtgtgtgccaccacatccggctaatttttgtgtttttagtagagatggggtttcaccatgttggccaggctggtctcaaactcctgacctgaagtgatccacccacctcagcctcccaaagtgttgcgattacaggcgtgagccactgcaccctgccgggataaataacttttatcaaaaattattaaattaagacagattgacgatatttttattttttattttggtttttgagacagctctgtcgcccaggttggagtgcagtggcacgatcgtggctcactgtagcctcaagctgcccaggctcaggtgatcttcccatctcagcctcccaagtagctgggactataggcgtacaccaccatgtctggctaatttttttgtattttgtagagatggggttttgttatgttgtccaggctgttctcaaactcttgggatcaagctctccgcccactttggcctcccaaagtgctgggattacaggcataagccatggcgactggcaacatttttagttttaagaagtcatttcttatctttttctctttgttacattgttagtctgataacacagtgagaacatcttaacctcaaataaacactgttgagtactctcaatgttggatacttcagtttatagtttaatatggcatccaagaggaaaaagaatttaaaatcgaggatgatttatatatatacacttttttcatcagtctattcattttctcatctcatttctcggggtttgggtttaaaaaacaatcaattttttgaactgttttgtaaaaagtattcactaaaatttagctctcctgaggggaggtaattttaccatctgatagttcttttatgttttgtctctgtttacataaagttcctaattcctgttctccaaagatactgcttatatagtcaaacttgtagaagttttattccctcaccctcataaaaattcaattagtaatatggaacaccttattcctcactctttattctctggagctttgcgacaaataggaggttagcagaaaagaattgtgacaaaatgagaaaggcttagaagtgcatttggaagctaagaataattaaactgaacgaaatgagacaagagtgttgatttacctgttgaaaaactgcaagccttgacaaaaggtaaaataatgttttatggaaaacctaccaaagtaatgggtctgttctttagccctttgaatagtttaaatagctgtgatttcagttcagtagttgggtgaatgttcaggtttgagatgtcaaaataatctactgaacataaatatacgagtttgcaacacttttagtgataatttttcaggaacatagtaggcttatcaaatttgctgatcagaggaagtcaagaaggatggctaacatagtagttaacaggtattcagagagctgaatttagagtcatctttaagttagcaaactttttttttttttttttttttttttaaagagacaaggtctcactgtcttgaactcctggactcaagtaatcttcccatcttggtctcatgagtaactagggctatgggcatgtaacaccaagcctggctaatttttttattttaaaatattttgtgtagagacgagatctctctgtattgcccaggctgctctcagacttctggcctcaagtgatcctcctgcctcttttcccaaagtgttgggattatataggcttgagccactgcacctggtagttagcagactatttattgaaggcctgtatactaggctttgagtcctgagggtagactgggaacaaaattaatatcatatgaagcaggtaagacagacatttaacacattattttttaaaaaaagtttttcagggatggggtctcattatgttgcctaggctgtccttgaactcctaggctcaagcagtcctcttgactcagcctcccaagtagctgggactacaggtatatgccactgggcctggcttaaacaaatcattttaaatgtgcagtcttttaagatagtctacctagattcacattctgctgttttttattggccatgtgcctttcggcaaattgctttactgctttgtgtctcagctttctcttctataacataggggttataatggtacctatcttaggttcttatgaaaattaaatgtgataatgtgtataaaatgctacagtggcttgcctgtagtcaacactcaataaatattagctgttttaattgttatctcttagcactttccatctttgttttatggagaaaaacagtgattaattagaaaatcctaatttaacctagtccaaattataaggtcaaggaagcttccttgacataattcctacccgggagaaacttatacttgaatatttataaacaaattgcaataaagatatataaatacagataagtacagaatggttactgtgggaagatatagatgggataccaagggcctcagtttgtacaattctgatgtgacaatgtttacattatgttatgaatggtacccccctgcagttggcagtgtagtttttttctaggcagtgtaggcctgattaggggagtgatatttgagttaaattttgatgatgacaggggatgagggagaagggcagctcaagcagagggaatttcatgtacaaagtcagtgaataagagatggcagtgtttggggacctggaattggttcattatggttagaatgtaggatgaatgtgatcgctaagagatgagaacaagaggttggattatgaaggaccctttttgctttattaataccttgagattttatctgaatctgggaagctattgaatgacttaaatgattaaaatgatcagatttatttttagaaggtggctcaggcaatactaagaagaatggtttggagtaggaacaggtctagaagctgggagaaggtagttgtagtagtctaggtgaatgttcctcctagtgtggacccaaactttattacaaattggcagtgataaataaaaacatttctccttatcccataacttgcttgaggctcattactagatatttagaaactttcatggcagtttgacatggttcatggtatataacctttgttgggccttcagtgttctctagcaagtcttagacttgtctcaagtcagctcatttctccactgctcacacagctatttctaaccactaccactttcctcaagttcctactccacctcttcctcagtttctacagatgacttcattcccctatttcacagagaagataaagccaagggatgcaggaactgggtaacttcctgttacacccacagacgaagttatgtcaacgtagctttcctttacttttcagtctccagatcctgttctcttccagtttttccagaggctttactccactattatcttctttcaggtgttcaacctctgcccctctccctttcctcttaccctgtaaacttactgaaacctcatccctaaattcaaccctcatcctctagattaccagtctaacctctttctttcccttcgcagccaaggtccttgaaaatgtagttgtccatcactgtctctgcctcttcatctttcatttattcacagtccactgtgcagtcatttctacatataccatataccatacagcccaaactgctctgacaaatacatgacctgttattaactagcagttaagtaccaaatccagtgggcacatttcagtccttacgatttatgttgcatgtactaatagtttgttcttgttcattgtattaatatatcacaactttaaaaccctcttcacctgttgatggacatttaggttgtttgcagtttttggttattacaaataaaattggaatgaatattcatttacaatatttctgtggacataggctttcatttctcttgggtaaatacctaggagtggaatgactggttcaaattatatgttcaagcttaaaagaaactaccaaactgttttccaaagcaatcgcaatttgcattcccaccaacaaggtataaaagttccagttgcttgtgagcatttggtgatatccaattttttcttcctaattttagccattttaataggtatgtaatactgtttatagtggttttgcatttccctaataactcaagatgttgagcatcttttcaagtgcttattagctgtctctgtatccttttttgtaaagtatctattcaagcctttgcccatattttaattgggtggctttcttaatagtaggttttgaatgatctttacatattccggatataaatcctctttcagatacgtgatttgcaaatattttctcccagtctgtagttcctttttaaaaaaattctcctgagtgtcttttgcaatacaaacattttaattttggtgaagtccagttgatccactttttcttttcagatcataacttttggtgttaaatctagaaactctttgcctgacccaggtcatgaagaattctgcgttttcttctaaaagttgtatagtttaatggtttacactgaagtctgtatttcatgtttgggttagtttttgtactagatgtgaagtttaggtagacctttatttttatttttatgttttttacaaaaagaacatctattcatttattgaagttttaacaatttttatgtacatggacaatgcttgcacacaaagtcagcattctaatgcactttcatggagtcaaatttgcaaaacatgcataaaacaaattagaactctctaacagtctctatgcaatttatatctccagtattggaaatgatgtgaagattaaatacatggcacagagaattgtttaaaaaaaaaaaaaggctgacaattaaaagtagtggaaaaaaatttttaaaagaaaaaactaaaaaaattcaatatataaaaaaactggcattagggatagatttgggcagttagcatggagatagttcataagatctggtcaaacatgatgcaactatcctgtgatggtgacttttgggatcttagatgttagagattgagactttggggattttgctcttttgggatttcaacactgaggattatggcgttcaaaattgtgtctcggtattgtgatccaaactgtaggtagaccttcttaaaatatatatatatatatatatggtctgggcatggtggctcacacctataatcccagcactttgggaggccatggcaggtgaatcacctgaggtcaagagtttgagaccagcctggccaacatggtgaaaccccacctctactaaaaatacaaaaattagcagggcatggtggtgcacgcctgtaatcccagctactcaggaggctgaggtaggagaattgcttgaagccgagaggtggaggttgcagtaagccgagagggagccaccacactccagcctgggccacagagcgagactccgtctcaaaaaaaaaaaaaaaaaaatatggatgttcgattgttccaataccatttgttgaaaagtttgtcctttctccattgatttgcctttatacttttctcataaaattaattggccatagttgtgtgtctcatttcttctttaacctatagattgcttagaagtgtgtttttaattttctttttttctttttagtcaagtgcagtagtcagaagggggaaagagtaaaataaggagttgtatttggaactgactgaacaatcaagggaacttaatatcttcagatgatcctgtttttaattttcaaaaatgatatttgtttttaggttactatcttgtgatataattttgttgtgattagaatatgtggtttgcgtgattgataccattttgggggggaatttgttgagatttaccttgtggccttgtatgtgatcactatttataaatatccttttgtttttaaaacgtatatttattctgcagttgattaatgttttgtatatgtccactaaagtttgctaattgtattttaatttttaaaattttttctattttttagagacaagatctctttctgttgcccaagctagaatgcaatggcatgatcatagctcactgtaacctcaaacttgtgagttcaagtgatcccctgctgcagccttcagagtagctgggactataggcatgtgccaccacaccaggctaatttttaaaatttttatagagatgggatctcactatgttgcccaagctggtcttgaactcctgggctcaagcgatcctcacgcctcagcctcccaatgtgctggaattacaggtgtaagccacacacctagccttttttgatgtgtttctactatagtaagtaccacccaatcaagatacagaacattttatcaccccagaaagttcactcaagtaaattctaccatgcatccccctccccctgccctaggcagccacttttttggtttctgtcatctttgattagttttgcttgttcttagattttatatagatagaatcttacaatatgtatgtactcttatgtgcgaggcttctttcactctacataatgtttttgcaattcatctatgttgcttgcacatatcagtgtttttttctctttattactgaatcatatgtcagtgtatgaatatagcacagtttgtttatccatccttctgttccttccagttttagactattcttacataagtctttttatggatataagtttttatttctctaaggataaatatctagggatggaattgctgggttgtagagtacatatatatttaactttattaagattgccaaagcagttttccaaagtggctttaccagtttgtactactaccagcaaagatgagagttctaacccacttgcaaatccttgcaaaatttgatggtctttgaatgtagccattttagtgggtgtgaagtagtatctcattttagttttaatttgcattaccatgatggctaatgatgtttgccacattttcatgtatttattggctgttggcatgtctttttttttcctgaaaattctgttgaagttttccacccatttaaatgattggtttgtcattattattattatactgtaggagtcttatttctttttctgaataccagccttttgacagatcaatctattgtattttctcctactctgtaacttaccttttcattttgtaaatgatgtcttttgatgaacagaaaattctattttgagaagttaagtttatcaactttttcttttattattagtacattttttggttcagtataagaaatctttgtctagctgggcatggtgtttcgtgcctgtaatcctagcattctgggaggccgaggcaggcagatcacctgaggtcaggagttcgagatcagcctggccaacatggtgaaaccctgtctctactaaaattagaaaaattagtgaggcatagtggcctatgcctgtaatcccagctactcaggaggctgaggcatgagaatcatttgaatccaggaggcggaggttgcagtgagccaagatcgcaccaccgcgctccagcctgggcaacagagcaagactgtgtctcaaaaaaaaagaagaaatctttgtctagtgccaaggtcatgaaactattctcttttattttttctggaagttttaaggttttaatttttatgtttaggtaagttttccatctgaaattaatttttttttttttttttttgagacggaatctcgccctgttgccaggctggagtgcagtggtgcgatctcggctcactgcagcctccaccttccaggttcaaggattctcctacctcagcctcctgaggagctgggactacaggcacacaccaccatgcccagctaatttttatatttttagtagagacgggtttcaccatgttggccaggatggtcttgatctcttgaccttgtgatcctcccacctcggcctcccaaagtgctgggattacaggcatgagccaccgtgcccagcctgaaattaatttttgtatatggactaagataagggtttgaggcatttttgttgttttgttttttaaaatactaattttaaagtaaaatattaattttaaagtaaaatactaattttaaagtaaaacactattctaaaatactaattttacctattctcacaacatccttctttaagaagattttttcacccttattgaatagccttgctccactgtggaaaatcaattgactatataaatatagtgaaattctaagcttttctgtttcattagtcttttggtctagtcttatgttaatgccacactgtctttatatactgtagctttagagcaggatttttccatctcagcactattgacattttgggcctgatagttctttgctgtgggagggtctcctatgtattataggatgttcagcatcatcccttgcctccaccactaaatgctagtagccactcagtaggtgtgataatcaaaaaatgtctacagacagtaccaaatgtcccctagggaacaaagtcaccctcagttgagaaacactattttaaagtaactcttgaagtcagatagcgtaagtcttccaacttacttgttttaattcaagattattttggctactctagaagctttgtgttttcatatcattacagaattagcttgtcagtttctttaaaaatctgttgggatatttattggaagatgtcaactctgtagatcaaatagaagagaatttttaagaaagttgagtgttccattccatgaacatggtatagctctccacttttttttttttttttttaacagcctttgtcaaccactctgatctccatttattatagtctttaatttctcttggcagtgtttgggagcttgcattttagaggccttgcacatgtttagtttatcactaagtatttaatatttttcgatgccattggaaatggtatttttattttcagtttcactgtccaatgtcattgactagttgtaggcactcctgtcctgccttcaaccttacattcacttaaggcaccatgttacttgagggcgatccctctcagcaatcctgctgtatcctacgtgaaggcttcatcagaaagaattggcagaacaggtctggagagcctcaggttttaattaattaagtcaaatatcttcagccaatgaaaggttgctaaaagattattttggtttctcttgccctgctttcagcatgcagtttactcttctttccactgtgacccagggatgaaaagggcttggagtgttttctctcttagcaagggcttctctttctctggagtttagttcatttacgttctttgagttctcagctttcttgtatacaaccacccaactaaccaaccaaccacccaacaaaaagtatgatttcattgcttatctaaccttttctccttgttatgcaaagtgtcatatttctgtgttctaactggaagtggttaaccagttttctttgttctgtgttttggtagatgttttaacttcttttttatttttttattttcagcatttctgttcttatattttatatgtctctgatatacagcatacatttaaattcagctttttaatctagtctgacaatcttttaagggaaacacttaattcatttccatcaattgtgcttactgatcttctttcttcttctttttcttttttttttttttttgagacagggttttgcttggtcacccaggctggagtgcagatgtgcggttacggctcactgcagcctccacctgctgtgctcaagcaatcctccaacttcagcctcccaaggggctgggaccacagtcacatgccaccacgcccaactaatttttaaaaactttttgtagagacagggtctcactgtgttgcccaggctggtctcagactgccgagatgagtgcgctgatctttttaaatttgtccctaccaccttatttatatatttcttatgttctgcttttcatatttttctctttatttgccttcttttgaattgcttgagattttccaccccttatttgtaagtttcataccttattttgttctttcagttgcccttgaaattttagtatgcatgtttaaattccatgggtaataaatattgtttattttcgaatctgcctggtccgttttaatagtctcctattctgtcatacttgttcccccttttatattttttcaaatacattaaaaatattttatgtttgcatctgataatactcttatctgctgtctttgttggtctaatacattggctcttacttgtaggtgcttgtttctttggtgattttgtaaaattgtgagcccatgacattagaactttattttttgtgatttttttgaagcagggtattagatttttttttttccagagatgatgtgagtatctagtagtaccacctacttttaagtaaatttttgacttgagtttttcaggccacaccactagtttgaattttagtcacaaagggtgcagacttactaagaattcacagtggagacatatttctgttttactcttctaccaagaaccaaagccaataaagacccttattctcattatcgccctctgcagaatgagcttttacctatttcacttactaaggatgcagacttttgggaggcttctagcatatttgtaaaggtatagttaatccagtctcctgggaagggccccaggtggcctcctgtcatctcagcaagtagcccattaaaacctaggcttttgtccaccgaggattggccagtaactccagggaaaactgtctataatgttactcacctttgtgaatgtatatttctttcttgtttctgctctccaggaatttctttgcttccctctcaaggttaaccatgtattttatccagcatctttagatgcttttccatctaatttacttttattctatactcatatctttaggaattacctctagctctttttgaaatgtggcaaggggaaaaataaagtccataatcggtcctgtctcccagtttagaatgtcttttcctatttcaactgtgataaattcatcctcctcttcactcacttcagatgttcttctctttaggtattctccccatctggctcaactcctacccctatatatacccccggtagaatgaattactcttttacgtttgtttctatacttctttatatatatatctttcttaaaggagaggtatccctgtagacacaaagatagagactgaattctatttatttctatgttcctagcatgtaatatgcattcactaaagtttgttgaattgagttttcaaagtctttataaccaactcttgaaattttaagcttctagctaggactgttataacttaatttgctagttttagaaaataacttttaaagcaattaaagcttattcaacacgttgaagataaaataattttatttggtatttggtaaattccttgggctagtcctatttaaggatggattaaaatatgatagaagtgttatcttacaatctccagatgggctggggtgatgtaattttggagcaaatgaacattcacatcccaattctaaatctgagctcattttaaaattatacacttgcgggatgatctgtgccacaaaccatgacacacatttgcctatgtaacaaacctgcacatcctgcacatgtacccctgaacttaaaagttggagaaaaaaattacgcactttgtatctgtaacatcaaggggaatttttgcctttgggttactatttttaaaaaatttttttaaatggatacagtgatagattttagagcataacagttacaaatggagaggtttcctaaatgaccttgattactttgtgtgtgttggggtagggggttgaggaggttgtttttctcctgttgcctgaatttaaatgttttttctatggtgaattacataattatttcgtggccattatatatttgtcctgcagttttttattatttttttacgaaaagagatctaagggcctttaggtgtccattggcaaagctgattttataaatatgtgtttcttttgcctagcatcttttcacatatttgaagatatatagatgggaaaagagcagtaggatgaaaaagggaggtgagaagaattcttcgtagagagcaaaaacaggtgaggaaagcaactagtgtagcggttgggatgacttaacaatagagggaaggcacaggtcagagaagaaggcaagaggaggtgccaacacccgaggttgggaggtggacaccaagctggctcatgatgaaacaagctggcgtatttcacttgtaaatgtttttataatatgcacttttcattttaacatctccaaaattaggatgtttcttacaattgtttgctttttatttttgttagtacataaaataatggcacatttaccattagtggcattttacagttaatgaaatatggtataattttacattgctcacaaggagtattggctgtgttagcctgctagtttacattatgtgatctggcagacaaatcagtttttaaaaacattcagaaacagactcagcattcaggtgatttggacaactgattgatgttattccaaaagaaacctctctctaaggtgattcgtgtgaaactagcaacttctttttgtaaaaggtctgccactggataggctgtgtttgcagttgccacaaattctgaatcaaaggcaagtaatcattaggtggaaatcaaagtaacctttctctacccctgtgatttgaggggctatttccctgaagcatgtgcaaattatttgttaggcaagaacaacttgtatggcaacttcttagcattgcttagacaacatctctgtacagtttgtgcctcaggttcatctctgttttgtattcttgagtctctttggaattttgacacagcaattgagctctcagacttacttattttacaaaattgggcatttgagtaaaaagtgcctcaacttaaaaactgttcttaagttttcttcttttgctttggctactataaagcccagagtcaaatgtgcaccctcctcagttaagggatgtagagtttcttagcttatgttttgggtacagaccactttctcggtcccttcacccccacttcataagcttcctacccattttttcccccttcctcaaacccttattcctcctcttcccgcaccctttaatcttacactgtatgcttctgtcttagctacctcccgtctgttttggaatggggtgggatatagataaaagctaaaaacgtcaacagataaaatctatctttaaaaaacatttacccatacagtgaaaaaagcacattgaaatggtgaagtgaaaagcccagttttgttgtcctttttttgtatatgtcttaaatgaggtgagttgttttgaggaaaggcgaattttgctttgccaacatttgtgatggctttagtgtgttggagctaaaaaggattgtgagctctttcaagttacttctaatttagagacactagatttttaaagaaaaggataattaaaaatttggataactttaaaagatggagttactgtcaaaataccaaagactaggtagcttataaacaacaaaagtttatttctcacaattctggagactaggaagtccaagatcaaagcttctgcagatttggtggctggtgagggcccatttcctggttcatagatgatacattctcaatgtgttctcatctgatggaaagcagaaggcaggtctttggggcctcttttataaacggcactaatcccattcatgagggcttcaccttcatgatataatcacctctcccaaggtcccacttcctaataccatcatattggtgattaggatttcaacatacaaattttcaggggactcacacattcagtccaaagcagttcctgttgattagctgaaataatgtgacagagctgtactgttttccaacagaaaaggtacttttaacttttctgttagaaattttgatatttttcctgagactggagaaggtaaaagagtatccccatttttgtgcatctgtgtattaaattggtatgtgaataaaagaggacctatggtttataaaacagtgaaaaacaaagaagtggagtagagagggttagtatcattggttcatgcagttttttaaacatctgtcctaatctaaccaaattaagtgcaatgtagtaattggacttttgtattaccatattttgcctctcttcctatttcttctgcctctgaagtaacattgcagcttgtaagattgacaattatattcagtctgatataagtaaaatttgctaatttaatgctgtgtgtcatgccatggtttttttaaattgatgttttctttagttagtacccgtgtcccttttactttttccctttctttgctttgtacttctctttctttctttttttttttttttttttttttttggctttgtacttctctttcttagacaaggtacaaacctcctttccctgccttctttccttcccttgtttgccacctgtattagtccgttttcacattgctgataaagacgtgcttgagactgggaagaaaaagaggtttaattggacttgcagttccatgtggcttggaaggcctcagaatcatggtgggaggcgaaaggcacctcttaacatggtggcggcaagagaaaatgaggaagataaaaaagcagaatcccctgataaaaccatcagatctcatgagacttattcactaccacgagaacagtatgggggaaactgccctcatgattcaaattacctcccaccgggtccctcccacaacatgtaggaattatgggagtagaattcaagatgagatttgggtggggacacagccaaaccatatcaccagccctggaggataaaagtcattcctgagaattaattgtcttggaatacttaaattataaacaatttctaaggctattaggcatctgatactatcagttaatgcaaaacattaatctggagataaaattaggcatcttgatcagtttgatgccgagaatgccattatattaaactttgcattaatatggagggaattaataagaaaatgtttggaaactttagcttcttttgccagtggtgtgttataattctttcatactggaaataataaactaactatagattttcatgtttttatagtattaaccttattttaaattcctatcataggtctctctcataagtttcgaagaaagagtaattctttttaacaaatatatagatgcacagaaagttctgcttctttctcaagcatgttatagttataggaaaatatgaaacaattcttaagaggttgttcttccttaaggtatgcatttgttatttcaccaataaaaagaattcataaaaaaaaaagtgctatcgattgaagcttataaatgcctctactcattcaatcagctaaaattatgaaatggtatactgctttaatccagaaagtactgtacattatttttttctcccagaaaacatatgtgattattttctgtaatggcagctgaatgggggtttagatcattgcatatccagtaggaggaaattaaaatttaattatcagaaggtttcctgaaataacatgccttttttcaagcattgaagtaaaaatgactataaacctcttttgattatatgataaattagatcttttaccattaaaaaaaattaacagattttattttttaagtcagttttaggtttacagcaaaatttgggaagtacggagttcctgcctatctcccctgtgccacacacacagtcttcctcttggtagcaatattgaacctggcccaggaaattgttgaagactttgtcgggggtcattccatctgtggcaccagtaaattctgtcattgttatctctttctgccaggattactacacgtgttctcattgtagttagtcaccttatagccagtttcacccactttccattttactttgtgttcattttcagccttattggaagattaaataagatgatacatgtagtgtgcctagtacagtgccagactcagagtagtcagtttggtttatagcactctctctgtaaactacatggtttataaaccatggtttatagcacccattctctcaattgtgaataaagttcatctgtagtcctagcaaggcattaaaggacccttaaaaaaaagaccttagcctcccttctcagatttattgtactcttatggattctttttattgttaaaataaaattgaccattgtaaccatttaaaaatgtacagtatagttgtgttaactatatgcacattgttgtgcaacagatctctagaactttttcatcttgcaaaactgaaactacccattgaataacaacttcccatcctccctatcagctcctggaaaccacagtctactctctatttatattcatttgactactttagatacctaaataagtggaatcatgcagtatttgtctttttgtgactagaatatttcacttagcatgacatgctcaatgttcatctatgatgtagcatatgacaggatttccttttttaaggctgaataatattttgttgtatgtatataccgtattttctttatttatccattgatagacagatgtttccatctcttggcttttgtgaatcttgctgtaatgaacagatatgcaaatatctctttgagatcctggcttcaattcttttggatatatgtcaataagtagggttgctgaattatatggtaatcctatttttaagtttttgaagagccttcatactgttttccatagcaactggaccatttatattcgcaccagcagtatacatgggttccattattttcacatttttgccagcacatgttattttattgtattctatttttgatagtggccatcctagcaatacctcattgtggttttcatttgcattttcctgatgattagtgaggttgagcatcttttcatatgcttgttggccatttgtgtatcttctcttttgcccatttttaaaatcaggttattttgttgttgttgagttgtcagagttccttgtatattctaggaagtaaacatatatgatttgcaaatattttttcccattctataggttgccttatcactctgttgattgtttcctttgctgggcaaaagtttttgagtcctgttcatctgtttttgcttttgttgtctgtgcttttggtatcatatccaagaaataattgccaaatccaatatcatgaagcttttccccaatattttcttctaggaactttattgtttcaggtcttatgtttagatcgttaatccattttgagttgatttttgtatgtgatataagctaaggatccaacttcattcttttccatgtggctatctagtttccccaatattattattaacctgcaggtcagcgacttcagatctacaaactgctgaaattatgtgcagtattttgtgcatgtttgtgtgtgtgtatgtgtctgtcatttttaaagaagagcttccagtcaggcaccgtcgctcatgtctgtaatcctggcactttgggaggccaaggcaggaagattgcttgagcccaggagtttgcgaccagccttggcaacatagtgagaccctatctctacaaaaaattaggccaggcatagtggctcatgcctgtaattccagcactttgggaggttgaaacaggaagattgcttgagcccaggagttcaagaccagcctggcaacatagtgagaaccccatctctaccaaaaaaaagaaagatcattaactttcatcagattctgaaagtgattcccaacccttacccccaaagactaggactatgacaatctgaaacaggtaattacttaaatttactgtaatgcctggctaggggaaattgtggttattattggtacagagcacgcttatgaatgaagggtaagttcatgctgctcatgaagtgagaaacaggatgggaccaatatcgcgtgtagcatttggaggcattggagcatttggagtttgtttgcagtttctcatggacagggttagcagatcagcttagtgcataatcatgtcaaatattttgaaaatttgttgaaaacagaagaccaaacatccaaaatgttagaactagctgcttctaaaagatttattcggtgtaagttaatgtttttaattgtgtgccttttgttcaaggagcttagttccttgaagtaatcagtttagctttcagatctgattgtgttttttttgagacagggtgttgctctgtcacccaggctggagtgcagtggcccattcatggctcactgcagcatcaacctcctgggctcaatcgatccacccacttcagcctcctgagcagctgagactacaggcacatgccaccacacctggcttttttttttttcttttgtaaggacagagtttcaccatgttgcatagggtggtcttgaactcctgggctcaagtgatctacctgcctcaggctcccaaagtgctcagattagaggcatgggccaccatgccaggcctagacctggtttgtttttgttgtttttgagacagggtctcactttgttgcttaggctggagtgcagcggcgtgcgtgatcacagctcacttcagccttgaccttccaggctcaagtctcctgagtaactgggactacaggtgtatgccacatgcccagctaatttaaaaaaaaaaaatttaattttttttagagatagggtctcactgtgttgcccagactcactttttaatgaataggcgataatggttgtatgtttttggtaggtgttagtaattataatacaacattaaataaatattagaaatgacagtgtgttccatctcctgccaccactctttaggaaaaaaaataacaaatacaaataaaaagaactggaagaaagtctctttcattgtggggcaagattgactaaaagctgacctttgagctttattacctgaagcctctgttgttaacccttcacatgggccaatgacgtgtacactggggtaacaaaggaaatcaggttttgtgttcgttttaatgttacctgttaccaggtttgcatttgatattgacatctccaagcaaattccctgtccctaagaaaatcaacctgcaggagcatgtgttaggaatgcttttatacccctcatcactgaacacttgtcagttgcccaaagggacacttctcctctctgaaattcatggattttgttttgttttgttttgtttccttttgagatagagtctctctctgccacccaggccagagtgcagtggagcgatctcggatcactgtaacctctacctcccaggttcaagtgattctcttgcctcatcctcccgagtagctcggattacaggggcctaccattatgtctggctaatttttttatttttagtagagatggggttttgctatgttggccatgctggccatgctagtctcgaactcctgacctcacatgatccaccctcctcggcctcccaaagtgctgggattacaggcatgagccactgcgcccggcctgaaattcacgttgttttttaagtaactccttaaatagaaatgttccatctgcaacttattaagattggcttcttctgacagacctggccaaagaaaacagctttctgggtaatcttgtgtttcaaaaacattattagctgttaaaaggggggaaaagggagggatgtgtgtgctagcataacataaaactttcatttgagttacctgaattataaggaaatactttggcaaaatgcatctttatatgtcccagcagcctgaatgtgagtttctgctaatatgttcatcccctttttatcagttccctttgtctgaaattggggtgcctccctgcccttgtgaataggaagctgggaaaaagagtaggtggggttaaaagggaagcacagtcccctgtgtttcccgcagattttcttattgcaggatcagtttggattgtgagctgaaactgaagagcagaatttaatgttgacctctaaagttgatgcccaaaagggtttgtcttcactaaagcctgtctttttgaattgagtagagtgcttttggctgtaaaagctttgaaatgtaaacactgaggaaataacatgtttgtaatgtctacgtaatataacatatgcaggtgcacatcttagaattttctcacttatcctaaaagatacctaaatagaaatttaggaggaaatttttagccttaagaattggctatactatgtagtctaatgccaaggtttccactgtggcccttcctaaaaagtattttggttggtcataaaaactgtatgcagaggactgtctatttggaataatagtcacatggtttagaaataagtagagtttaaatttaccttttcccacactgttcttatgataccattccttctgctgcttgacatgtggaaatcagcttgtgcatttgttttcagttatgagcacctgtgaagcagcttgatctgtagaatctaattttatttgtttaattattagatgaaaaattctgggtatcaggatgggtgtctgtcccttttgtatctgtgacagtgcctaacatagcaccttgtaggtgattgataaatatttgttgaatgaataaacatgtatcatccttctttgaaaaatacatgaatttgtggagactttgattactttttaaccaagtatgtttttggaacagagaagagtattatttacattatactgataagatgttgctgttatatcacattcagaaaggcaaagcttcctgtactagattacatagatttaaaatatagtgtctgagcctttgtagtgaatgctacccaggagtttatatcagatgtctaagttcccagcccagaactcctaaacccaagtcacagcagatagagacatccatttttaaaaagttctaacagtaactctaatggattgagggtacattttatgatttttgttgttgttgttggtttatatgtttgtttttagtgtcaaagaaaccattctttgacatggatttataaatatttgacattttgaacataagtcttgtgaacattgttttaaatctctggccattcaatagatgctgctttatttttctttcagaggtgggattttcgtagtcccagctaaccatgaaaattctttgtatgacccttaaataatatataggtatgaagacactatacagaagtagccacagaggagtggtttaagttatgttgagtagtcctcaaaatctcaccccactcccactagatagcagacttccatgagaactgcttgtgcctaccacaaaacaattatgaaaggaatgagccatatcatgatacagctgtgagggctgtgtggaagacccattagcccagtattcaagaagactaaggcccacttgagttaagtatagtgggtttaacgctggactcagaggtagcaacctagcttgcctcctaaattctgcatttaatagttgcgtgactatgaacaccttcttttaactacctatgagtattgtttcctcatctgcaaagtgaaagtaaaagaccctacgttacatggttattgtaaagattaaatgagatagcctttggtgtaaaatggtttaacacatggtaggtagtcaaaaaatgttgcagcacatacttattgataaccttcactggtttattaagatgaaataggtttcttgagttaggaaatactgttttgttaagtgtctaactcaaagtctgaaagctagtgagtgatagaatcaggaacagaaagaacccagcctcctaagtgccaatccaaaaagaggtggtaataggagtaagtcttccaggcttctgaattgcctgggctgtgacttgtcaacggggctgtacattctgtcccactaccttttctttttttttttcgagatggagtcttgctctgtcacccaggctggagtgcggtggcgcaatctcggctcactgcaacctccacctcccaggttcaagtgattctcctgcctcagcctcccgagtagctgagatttcaggcacctgccaccatgcccggctaatttttgtatttttagtagagatggggtttcaccacgttggccaggctggtcttgaactcctaacctcatgatctgcccgctttggccttccaaagtgctgggattacaggcgtgagccaccgcacccagcccctgtccctaccttttctattttttgcagtattgttccatgctgcgcaaaagtttgtgaaaaaacacaaatcagtacatcaaggttcagtatatgactaatctaattttagccattagaatcagctgtacagtgtagtctaatgccaaggtttctattgtggcccttcctaaaaagtgttttggttggtcataaaaactgtatgtagaggactgtttatttgaaataatagtcacatggtttagaaataagcagatggaacagtctatctttatttcaagtgcccaagatttgtgattcatcaggttaggtaaaaattatcacgttttatgccttttgtctccccaccccagcccctggtgacactattctgttagcacatggagtgaataaagtttacatcaaccagcagaaaggaagtttccattatcatcccccaacccagagcattttttggagcattcttcacaaataagtaattaaatttaaacttaaacaagcgaagaaagtacatacagtcatgcactgcataatgatgtttcagtcaatgacggaccacatacacaatagtgatccgttaaaattataagagctgaaggctgggcatggtggctcacgcttgtaatcccagcactttgggaggccgaggtgggtgcatcacttgaggccaagagttcaagacaagcctggccaacgtggtgaaaccccatctctactaaaaatacaaaaagtagccaggcgtagtggtgcgcagctgtaatcccagctactcggaaaggctgagacaggagaaccgcttgaacccaggaggcagaggctgcagtgagccaagatggtgccactgcactccagcctggatgacagagcaagacccagtctcaagaaaaaaaagaaaaaagtagagctgaaagattcctattgcccagagacatagccatcataaagtcatagtgcaacaccattacattttggctgtttagatctgttagatacacaaatttgtcacagtaacatgctgtacaggtttgtggcctaggagcaataggctataccgtatagcctaggtgtgtagtaggctataccatctaggtttgtgtaagtacactctatgacatctatgacatcatatgacaaaaatcacctaatgacgcatttctcagaacatatccctgttgttaagtgacacatgatgactgaaattgccacatttttcccccaaaccagtaatacttttaaaaggtaactatagtttttttaaatcatgtatgtgtgttttaataaataagacatttacataattcagaattcaaaagatacgaaaggatttacaagttttttgtttcatctatctcccagttaccaactgtcacccagttacccctctcagaggcaaagaaaaacaggttactagtttccttttaatgatccttgctggaaatcacataacaattccttttatgttccatgggctagaattgaataatatgggcataatagctgcagaagaaaaggaaaatactgtcttttagttgaatgcattgctactttgaaaaaaactgaagttctgtttctgaggaagcgtgagagaacatgctactagatggcatctagaagtctttgcctaagattaagagctgatgtatactcaccaatgatgtatgaaaatacagttttatagtattattgttttgttattttttagcaaacctacataactgaatttttataaagattttgttttttgccttaactttattttttaaaatatttttaaattttttttcaagatctcatgaggttgcatttccttcactttaatatctaactccagcataagtcagtataagtgactctgtgatgagtcacatctcatttaaaattgagagttaaggctgagagtggtggctcacgcctataatcccagcactttgagaggcagtaggatcacttgagactagaatttcgagaccagcctgggcaacaaaacgagacctcatctcttaaaaaaaaatatatacatatatatatattttatattttagctggttgtggtggcgtgcacctgtagtcccagctactctggaggctgaggtaagaggatcacttgagctcaggagttcaaggctgcagtgagctaagatcacatcactgcactccagcctgggtgacaccccatgaccttgtcgctctcaaaaaaaaaaaaaagttgatattgagtatatggcaaacaaaataatttttataaggattatgagtgaatcttttgctgttagatggacaaaataaatgagttttcagagatagtaaagttaaccttacatttatgtgaaaattactaccacatttctagcatgcttagagtttgtaatttcaaatattatctgatttaattttttaacttttatataggctgtctatatgtgccaaattagggaaaatttgggaaatgtgggtcagaaatgagttagagctatgtgtaggtattaacaagtggtatttgaattggacttggtgagaaagatttggttctagcttggttcttttgagtgttttatactcaatcctgaatatcagagatactgtagaaatgctaatcattcacctttattgtatagagggatgtaaatcagaatagaagatcattatctcgccaatgggaatatttcagctaatggaaatagtagatggggctatggtatagaaacagattaggtaagagcatacgggcatatttggggaatagctattgtctagtttgtcagtggagtagaatatatgtagaagagaaggaagataaaactagaaacagggattgggctttgaatgttaggaaatttggattttatttattttctgttcaaaattttgctccaagtttttgaaagtgaccttgtttgtattggatcagtatgttaggtagatggttagcttggatgatttctaagattccttttggtcctgtgaatctgtaacccatgatgaagttgggctttagacatgtcacctctttggtgtcatcatgagagatttgataatcagtcacaaagtttatagcttaatatggtgaatgaggtcaccaaaggaggaaaggctagagaaataaaaaggttgaactttgagaatgtcagcatctagggagtggttccctctcttatttttccccttggaatttaattttgaggaattcaggtggctttgtcttagagtttatcacaatctgtatgttactggttgcatccatgtagtatatagcatgttattctgctctcttttctgttcattggtagtttaatctggagacttgatcacattcatgtttctgtttatttgcttgtttgttttttgatgggtggctatgactacttcattagatagtacaagtgatctgtacttaatcaggaggcacataatattggatcatctctgctttttcatattatagacattgatgattaatacctagatccattaatttgttaaggtttgcaaaatggtaataatctaattctaccaggtcttctgtatttgttagctgaaatagttctataaagtgaaacttcattttctatttgattacttgttggtaggtacggtttctataaatgatgggataaatgcataatttgtttgctttattcattttcaaaataatgaattgatccattagcatcctctaacagtaaccagttaattaacttatggatttaagttatatttcatatagaaaaatatttcttagtttcaaatagaaaaatatttgatatttttatttcactgaaatcattgtctttattggtatgcaagttgttattttggtcactgggctcctgagtccttttgacataaccctagttgtctagatttgacaacatgttccaggctcatctgtacattttctaacccagatctggaatcagccatttctccaaggttcccttggcactagaggtactcatcgcttgggtttgtcattgtttctaggctttttttagtgggcatatctttaagataaaatgataccaggagttcatactgatacttcaaattcaaatgattaaaattctggtcttgaatctcctttttcccatacaaagtattggttcccttggttttcagtggtgccagaaatgatagaattagaacttcacataagtattcatttgttcacctcacagtgcatacacagtactcagaataccagcaccaacaatatgattaatgaaaacaggtttagatgatgtaaagaactttgttaaaatcatatggtttggtaagtttgatgtacgtatacacatgaaactattgcctcagtcaagattctgaacatattcatcaccacaaattcctctacccctttgtaatattttctttccccacctttctcttcccactgccatctgtaggctttttgtcactatagattagttttcatttcctagatttttatgtaaatagaatcatataaaatgaactctttttcatctggcttctttcacgcagcttatttattttgagatctatccatgttgttgcatgaattaatagttcattccttttttattgcttagtagtaatctattgtagagatatactatagttttgttgtttttttttttcattcacttactgatgaacatttgagttatttctagtttagggctattagaaacaaaactccttggacattcatatataagtctttgcatggacatatgccttcatttcacctggaatgaaatggctggataataagctaggtgtatgcataatttttttaagttaaattgttttcccaaatggttttaccacctcacatttccaccaatagtgtgtgagttccagtacctccgtatcactgctgttacttagtatggttagttttttaaattttagatattttaatgtgtgtgtagtgttacttgtggttataatttgcattttgctaatgactagtgatctgccatccttatgtcttctttgctgaattatctgttcaaatcttctctctacttttaaaaaaaattgtgtgtgtattttttttattgagctttgagggttttctaatgctgaatacaaatcctttatcagcaacatcatttgcaaataagtactcccagtttgtggcttgtgtttttgtctttgtaacagtgtcttttgaagagcagaagtttctaattttaatgacttccagtttatcagaattttaaatgaatcatgcatgtttatctttcttgttggctttttagttgtaactgtttgctatattattttaatgattggctttaagtatatggtatacatctttaacctatcacagtataccttcaattggtattatactattttatgcatagcatagtagtctatatccatttctcaccttccagcctttgggctactgctgtcatacatttcactcttacatatgttttaagccccacactacattgttattttgctttaaacagttgtcttttaaggagatttaaataataccaaaagtctttatatttacctgtgtggttgttgtttcctgtgcttgttattattttccatgctcttcatttctttgtagatacccagtttttcatctgttagtcattttacttcctttatgactacttatagtgcaagtctgctggtgataaattattttaatttttttttaatgtctgaaaaagtctttatagcatctccatttttgaaaggtttttttagccacgtggtagctcacacctgtaatcccaacactttgggaggccgagaggtgggaggatcgcttgaggccaggaatttgagatctcctggtgggagcttgttaaaaacatagcgggagcttgttaaaaaataataataataatgaaagttatttttgctgggtatgcaattttagggtgacttcctttaagtacttcaaagatgttactctgttattttctgggttgtattgttttcaatgagaaatatgctataatccttatctttgttcctctgtgtgtaatatgtctttttttcctctggcagctttaaagatttttctctttatcagtggttttgagcaatttgattgtgatgtctaaatgtaattttcttcatgtttcttcttgggattcagtgagtttcttggatctgtgggcttatattcatatagtggaatactatatatatgaaataaatgtactagatctagatatattaacatggatcaattttatttcattttatttatttactcgtcactgacttgaagcacatcaacatggataaattgtaaaaacaaggctgatttgggagaaagcaagttatatataaaagcttaggccagtgtgagccatttatgtaaattttaaaaacataaaacaaccatatttttatggctacagtcatatgtatcaaaagttaaagtgtgagtatcaaggattcataccagagccagaataatggtaaactgggacagattcagttaaagatgcagtctttggatgcatctgtagtagcattatgtcttaataaaatgtatctgaagcagatgtggtaaacacttttatctgggcaatgagtacacagcgtttaatttctacatttacacacatgtctaaaatatataattatatttatatatatatatatacacacacacatatataaaatcattgatatgaaaaaggtcaatacagttcttatagcttctgttgcttcactttattagatataaaataacccccttccacatagttaacatttcagtaatctaccaaataaaagttattcccagagatgtaagacctgtttctttagaatgtcatgaccagaatttccatagtaatctctaaaacgacactccagtgagacagtctgatctgtgggtcatttcctttcctgttaagagacctttgttaattccattttgcagtatcccagaagaaacattgcaggtgtgcaaccaatccaactgaaacagataatactgggtaatgttcccttcttactcttcctttttattaatgcacttattacccatcttccaaaataaaaagtctttgtcatactggcatctgatttttttttcttttgacaaccagcctgtcttctgtctcctgaattttattttaacatcttttaatatgttgccaggtaggcacccctagttgaacaagaaagacctggaaatcattagagctaacaatatacaggtttttcttaaatgtgctgccaaagggcataacctctttggattggtgacatgtagcacttgcacagcagcttttcttcccatttctaatggtaagaagtaaaatagccttctgtcaggaccaacttttctttggacacatgcttctaatcttaatgcattaagactggtgtgttgctcagagctttttttaaagaaaccaaagaaaaggcgggggggtggggggagaaggaaaggtaaggaaagcctactcagcattttcatttgtcttccaaaaagaatttacattgaaatgtaacagcagtttcagaaaacttgtggatgtacacatttctttacagcaaatggaaacaaatttagaacatttacttaataggtgggagctcttccattttggtgatacttatttttctctttggaggaagccatagtttgtgagggaatttttttgttcccattaactatataaatattttagaatggtcttttaggatttatctttcctgtcttaaagctgttccaccctcaggctcagtcaactgtgtaactgtttgttttctaaccagagttaagttagtaaagccctccccttcaacagtcacctatagcgtaacaagttcggggagataatagtcaaacaaaacagactgtatcctgcctcgaagtagaaagagctaagcaactaagtggcttgtttttattttattttattttattttattttattttattttattttattttattttattttatttatttattgagacagagtctcacttgcccaggctggagtgcagtggcgcaatcttggctcactgcaacatccgcctcccgggttcaaacaatgctccagtctcagcctcccgagtagctgggactacaggcatgtgccaccaagcccagctaatttttgtattttagtagagacggggtttcaccacattaaccaggatggtctcgatctcctgacctcctgatccacccaccttggccccccaaagtgctgggattacaggcgtgaaccaccgcacccggcctagtggcttgtttttttgttatatttttaaagttttcctaaaccagttttctgagactaagagtaacttcattagttgggaggggagttgcagggaggaggggatatgcattaacaaaacaaagggctttcctttctttgaaatattctcatgaccagatgctggaaaaatatacaatagatttcttaaatataattctagctctgaagtatatacatacttaatgaaaccaaaattgaatgctcctaaagtaggctgatctatatataatagcatttccaaaagtagaccttttgtgggcgatctccattaactctccctcggtatcttaactacatattccccttactccataggcattccaagaggagtaatttataataaaaaaaattctgtgaaatgtgatggtcatcaaagggttccttggaaggtatggtgggaaagctttgtaattgctgcttcacagaacttgagttgagggagagcagtctggtatagtgaaaagaacatacactgtagagtccaaaagactttaatccaatcccagttctgccccttattcttaggacggaagcaatctgacatcaactctcaaactacttgggagttgtacgtaacacgtggcaagttcgttaacttctctgtgcattagtttccctgtttgaaaaatgaagataacaattcttcccatgaaaattgcacaccaaagactcaccatatatttcatttgttcacctcatttatttgtgttttactggactaatggtttctgctattgttaataattaatgaacattgtgtcaggacttattctgttgtcagactgccttaggatatgatctgcattataacattagaatttcaatccaacatctctagaaagagtatgacaaaagattgcaaaaaaatgactattatttaatagggtagcagaaagaagctgtaacatttttactagaatatgattaattcacagatgctgacaaaagccattatattctcatcagatgatacttaataacttgtggacaaataagatgacttgtttttattcatgagagattatattaagctctctagaaaagctgtaattcttcagaacgtcctagaatttactgtatagggaatggttagattcttcaggtttctgagcaaaaacaacccccaaaacaaaaccaaattacccacgtagtttgagagatgatgtcagattgcttttgtcttaagaacctacaagcaagaacacatttcaataaggctgcctttctcttttacacctttgaaattactgccatggatatatttactagtagtgcattattaacccagctatggccacttgccttttgctgaccgagttcaaagcttatgtaccagagaggaaggtagtattgggaggggagttcttgacaaaggagctactgatttgcatttatggtaatacgtaatgtaaagtcagtcatcaaaagattaagtatctgaaaaggattatttcaaacattgccatccctaggggtttgctgttgaggcaaattacattatttatagtctttgaggtgggtgggtggtggggaggagagacaaaagctaatatttttatacaggtgaaaataagcatctggtaaagggaggtataagagttggaattcttggattacaaaagttcaacttatattagctaaaaagtgggtatgttgcctcacataaccaggcttcaagatggatagagtagaactagcctttgatagtgcaagacttgaatattgtcaagactcttgtctcctttctctgactttctctgcaaatttgtgtttattttttaaattgttttctccacagggcagaggtagttctcagtccacatatttgcagctcttctttaaccaaagaggaaagggacctgacctagctccagttttcatgatatctaagtcttttttggtggtggagaatgtagtctccttaccagaataaaattagaaggaaaaattgggaagatacaaataattgccacctcaagtggaagtcattactgtgagtgctagaaaaggattgtcctcatggggaaagagaccatgagttatacatggtgctagcaaatgttacatgatactattgttgctgcctttctgtgctagtcctcctgctttatccccatatttcccctctgtagtgcagtaccccctcaagctgggagggtagtcaacttggacagcggcctggaccctagggaagagtttgctgaaaagtctacatggccatgttatcagattcgttccattcctaattcagattaacagcttctacatgtgatggaattgtattactttctaaaaaaaatttcagactgtaactcaacatagttgtggaagaaattcagagcttgtgggaaaagatgcatctctctatccaagtctcacttctagaggcaaggattctactactcaggattgtagtatgattgtacactttaatcttcaaggactttattataaagcaaggtgccaatattattactgatgcagattatcctatgattccagatttctgcaattacaatatatatatttgaaatgattattccattaagcaacccacttgccccttgctgtgacccttgctatggtgtaacttttaatgtttctggttttacaaaagaaaatctgcatcaatccttaaagttacatttaaaatttacattaacagtacaaccagatggcattctgacactcactgtaagtattctaggatttttctaaaatagctggctcaaatagaaaagtcatctttttcccaagtgtgttcctgtccttttctcttgttgtgtgttctaactgttgcacttatattaaaatcataaaaccagaatggagaatttattccaaaagttcccatgcatttctccaatcttacttcctgttgcaaggacccaccatcacaaatgaagtgtaattgtacattcatgatgacgtcttgcttattaaatggtgacattcaagaaattgtcagcacaggcattcttttataggtcaaggatatacttattttgaaaacgttgaaaaataatagtaattatttaactgatttcagaagaatctatttcagtggcatcctggactttctactgactcactaaaaatagggatttttgaagaggatgacaaaattcataagtccttgattctactatgtaaaattataattttacacaagaaaaagtacaatgtggtttacttttagcctagtttaccatagttaagccaagaaaatgtaagctaaccaaaagcttgcagaattgtcgttattgtgactcagtggtatagacttgagttttcaaaaatgaagtgttcttgtaattttttttatcctcctacaatatagtctcagatatctagtcctaaggggctataattgaaggaatattgaaggaggagaaaatgtctgtcaacaatttgcatttggttggagaagattatgggaactttaatattggaatcctgacacctgggcatcaaaagggaaactttcaatgggtcattgctgtaaattaatcaaagcccttgtgcatattgaagacacttctctagtttcccactcccccatctatttccaaacagcagagagaacaggaaaaagaatttttcaacatcttaattttcttcaataaataagtccctaataaaaatctactgttacaaatcactggtgtcagagaaacagtttaagaagaaatcccttactactggcagatagagaattgcttcctttctgctcgaaaataagaggtgtattcttcttccagtagttgccttgtagcatgcataagtgggacactgaagggtctaaacagtgataggatggagcctttcccttgttttcatgctttgtgttatccagctgtgtcatttatgttacagtacaacatcccatcaccaccacctctagccagacttaatgagagtaagttttattctttttccatctaatgaaactttgcttgagccatttgcttatatttcagttttgtttgggatataacttaaaaatgagacaccaaggtacaagatgcatattataagttatttttattgtataacctctgaaggcaacattaaaaaatgttcaaataacaaaatacttactttttgattatagaaatttttaaattatactaatgttattaagaattggccatgcttctaactgtaattgttacttttattaagaaggtttaataaatgagtttcatttcttgtgtggatatctgtatttaacttggtttctttgacttggcattatacaagtaaaattcaaatttcctttttctgcagtcaaacttacatatatttattctcttctttgaattacataatgctgagttgcaggaaaaattggttaggcatggtccttgtgaacccaagttgtatttcagttttataaataaattatccttactcagtttgaatatctgaacctagttggattgggaaacgttattttaaagcaggcacaataaattatttaccctaaataatttaaagtatattgctttttttctgtttgaaattacctatagttgttatagtagtataaggcatcttacctactgttgatatgattataatgacagatacttgtacattttcagtgtcttcaattaagatgattgactctaagttttagcaactaggaaaccattgaggatatatcacttttcagttgtgattcctgcctttgttagtctccttgacaaattgaatttccattttacgttacagtgtgggtttaaattcaccaagctttaataaggatcctgttccttttcatttttttctttaagtgaatgtttacagggtaacctagttgacaaaagtttgtttcttggcactttgcatttgccacttctgtaattttttaaggtgtcgactggttattaatagattaatcttccttagaactacaaataaccagatccagcactgtgcccttttctttttatagataagggaactgagacccagataatataaacctacgaagtgtacactagaaccttctgttacttctttatctaccacagggcaaactgtaagtaaacaattaaaataactgattcaatttgtgaatcagctctcttgaaatgatatagttgctcatgttagatcttttgtgataacaatgattgaagtccaaaggtaattgtttaaaaaattgtcataagaattaggcagaacgggtagcctcatatacccaaggtggagtaaaagagagtagaaattatgaattatttttcttctaataatagaaatctgttatgatagttattactcacttatttgtactataactcttccaagtagaaagtaaacatttttgtcaaaggtaccagcataaaattcaggaaaggggaagaaaactgacattgagtacgtctttattcatcaataagggtgcatgtatattattggccacatcattttaattggatggatatttcattatttaaccaatcacctattgttgggcatacaagttttttcccagttatttttcacaactatgaaaagtttttcattaccattcttttttttttttttttttttttttgagatggatttttgctcttgttgcccaggctggagtgcaatggcgccatctcggctcaccacaccctccgcctcccgggttcaagtgattttcctgccttagcctcctgagtagctgcgattacagacatgcgccacgacgctcggctaattttttatttttagtagagacggggtttctgcatgttggtcaggctggtcttgaactcccgacctcaggtgattcacctacctctgcttcccaaagtgctgggattacaggtgtgagccaccgtgcctggctttcattaccattcttgtacaggcttattttgtctgattgtttctgtagtaaacatttccagaagtagaattttgggacaaaaaggtccacccattttttaagggtttcgataatacaacgccaaaatactctccagaaatgtactaattaacacctttcatcactagtgtaattcttgccaagtctatgagaaaaaaataatatctcagtttcaattttgtttcttttattagtgcagtggagtactatttcttttgttttctgattttgtgttccttttttaaaattaagattttgtttacatacaacaaaattcacctatctgtgaattttgtacacagtacagttttattttggtaattatatacgatcacggaacccccaccacaatcagaacgttgaacaggtctttcaccctaaaaagtttcttcctgtttctttgcaactggtcccctctcatctgcagccccaggcaaccattggtctagtttctgtcactatagttttgtcttgacaaaagtcattttgtagacatttatattttcaaataaatggagtcatattgtaaatagtcttttgtgtttgactttttttttttttttttttttgagacggagtcttgctctgtcgcccaggccggactgcggactgcagtggcgcaatctcggctcactgcaagctccgcttcccgggttcacgccattctcctgcctcagcctcccgagtagctgggactacaggcgcccgccaccgcgcccggctaattttttgtatttttagtagagacggggtttcaccttgttagccaggatggtctcgatctcctgacctcatgatccacccgcctcggcctcccaaagtgctgggattacaggcgtgagccaccgcgcccggccttgacttttttttacttagcataatgttttgagatccatccatgttttattaatatttcatttgttttatattattgagttgtgttctttgctatggatgtaccaacatttatttgtgtgttcatcacttgattagcatctggattgtgccaaagttttggcttttatgaatcacacaattgtgaacatttgtgtgcaagtttttacatagctcttgggtaaatacctcttttttacattgctcttttacattgctcattttagattttacattttacattacatagctctttttacattgctcttgggtaaatacttaggaatggaatttctaattcacatggtaagtatatatttaactttataagataccaccatactgctttccaaagtgtctgtacactttgcattcataccagcaaatgaggattttctccaaatcctcatgaccacttattattttcagacttttttaaaaccacgagctcatgttttattggaatagagaaacttggccataattacaatatagtatgattagtgctaaatatgtcagtcttttaaaacttcagccataccagtggctgtgtagtagaatcttactgtggttttaatttgcatttttctgactagtgattgttgagcatacttttatgagcttattagccatctgcataaagtgtggagaccttccctcagttttaattggattatttattctggatacaagccctttgtcatgtaggtgttttaaaatagtgtctcccatttggtggcttgccttttcattttcttaacagtgtattttgaagagcaaaatgtttttatcttatgaagttcatttcatctatttttttactttcatagtttttgcatctttgtgttctagaaatctttacctaacccaaagtcgcaaacattttatccaaatgacttttttccctgaaagtttaatcagttttaccttttaaatttagtcctgaaagggtagccttatatgtccaaggtggggtaaaagagggtagaaacgatgaattatttttcttttaataatagaaatctggccaacgttgaagttgtgtatagtgtgagagtaaaggtcatgagtcatttttctccatgtggatatcctattattccatcaccattggtttaaaaagctatcttttgttctgttgaattaccttggcctttgttgaaaattacttgacatataagcataggtctgtttttggactttgtgttctgttttattgacctctatgtctatcattatgccagtaccaccacatattgatttctgtagctttataatgttgaaatcaagtagtataaatcattcaacattgttcttcaaatttgttttacctattctaggtcctttgtctttacatacaaattttttaatcagctgttgctttcttcaaaaaagcctgcaggattttgattggaattgcatagaatctaaagataattttgggaggtttgccatttgaacagtaagtcttttaagccatgaacatgaatccatgggcatggtatatttctctttatttaggttgtcaccaatttctctttgcaatgttttgtatttctcagtgtacaagtcttgcacatctttcattaaatttatttgtgagtattttttttgtgtgtgcttcttttgtaaacagagttggggtttttattcatctttatcttctaattattcaaagctagtatgtagagatgcagttgagttttgtagattgacctcataccctggaactttgctgctttcatttattagttctagtagctctttgtatgtttcttaggatttactgcatgtatgattttatcatctgtcagtcaggacgttttgagtttttcctttctcattcatatgccatttatttatttacttgtttacttatttttttccctattggctagggacccagtgtacatgcacttttacaattgctatgtttccctgataaattgtccttatataggtataaaatgtctctatttcttgtataaattttatcttgagatttattttatctgattctaatataaccattttagctgccttatgcttacatgctatattctttttcatttatttacttttaacctatctgtatcttttgtttaaagtgtatcacttatagacagcatatgattgggtattgtttctttgtccattatgatagcctctgccttttaattggaattttggtttattaatctttaatgtaattagtgatgtatagtgaggtttgggtttaccattttgttgttgttgttttctattgttgcctgcattttgtttttatgttcctcttttccagccctctcacttttggattatttgaggtatatttttattaagatagaaaagcttatattaactaatctttttaagtgatctgctgacagtaattgctttaatcaaacattttttggatattgttgacttatgttaaagtagaaaaaagtttttggccaggtgcggtggctcacacctgtaatcccagcacttcgggaggctgaggcaggtggatcatgaggtcaggagatcgagactatcctgggcaacatggtaaaactctgtctctactaaaaatacaaaaattagctggacatggtggtgcatgcctgtagtcccagctatgcgggaggctgaggcaggagaatcacttgaacccgggaggcagatgttgcagtgagccgagatcacaccactgcacttccagcctggcaacagactgagactccatctcaaaaaaaaaaaaaaaaagtttttacccccctcagctagaaatatttcatggatttgggatattcagagttctgagggatgtgatgaggttgcaaaagaaatttggcagacttagaaagcctaatgaataaaagttcatttattatagagtctggcttgcatttttttctttgtagtttctcccatgggacagaagtttacttcaggggggcatcagctttgtcttattcctctttatatatgtagtacctagtgatggctagttagatgcccagtaaaggtatatggaaagagtaaatggtttgcaggtggctcttatgtctgtctttctgctataaagcattcatgtggagcaactctgcaatttctaacaaccttttaacaaccttttggtagtaattatcccttcctatatatttcctttcattcttctgagggagaaaaatggcaaaataaataaataaataaaaataaaaagttgaggaatggtggagtggagggaagttttgttatatgtgattcctagtctgtttcttgcaactttgtatagcataatatgctatctgagagtaacaagaatgagtcctgtagattgttctctggaagtatagcagaagttccataagccagccaccattgatattatgcattacatgcatttttaccatgatttaaaatctttttgcactcaaactttctaagattgtgctttacccttttttctgaactttggagcttttgcagtgtgaaagtttttgtttgaaagttgtattcatccatatatatttgtgtgtttatatataaatacatgcaaatttacaaagagctgcttcacatagtcaatacatatttaaggtcttaaagattcaattaagggaagttttgtgtatgtgtatttacaagtgagataatgaatttggaaatatgcatagattttaaactttttgtagttatcacagtggtaggaaattaatgtgttagtgatcaacttttgaagccaagttctgaatactttcaaaaatctagtgtcttcttaaacttagcaggtgcactctccctgtctatagtaaggtctgattaaggtttgtaatttgaaaacgtaagagatagtgcccagttaggttaaaataccaagagaaatagttttaagactgataagttctttgaaaaatgtattctgaccacttaacctgctaattttttgactcatacatttatcattttgttgtatacactcactctatttctgttgttgattaccattattatttaataaatgaaacattccagaattctttttcaacttgaaagaaatttcccattgacctttgtctagtgataaatgtgtttattgcctgatattcattttattacattattcactgaaattcctatattctttaagaacagagtagggattttgagatgtggtcttggagtagaagtatgtaaaatgtttttctaaccagtttctcaactagatcttggccatttctcactctctagtttctggtgatttgtaatccagtaaaaattgctatatataaacaatcatttttgctttatcaaagtggggcctggtcagtggaagatagggactggactttagttttgtttttgtttttttgagaccgagtctcgctgtcgcccaggctagagtgcagtggtgcaatctcggctcactgcaacatccgcctcccgggttcaagcgaattctccttccttagcctcctgagtagctgggattacaggcacacgccactatgcccagctaatttttgtttttttagtagagacgaggtttcaccatgttggtcaggctggtctcgaactcctgacctcgtgatctgtccaccttggccacctaaagtgctgggattacaggcgtgagccactacacccggccgggttttagttatttttattggatgttgtaagtggtaaattcagatagacttttttggcaagcacacaacgttttttgcccatatcactttgatggttagtttcatccttcttactgggtgagatggacaagcagagcaaggctctcaagagattaaaaaatgaggatccatgtggaagtaactttcagttatttggtaaaaggggataataatagtattgaagtgttcttacatggaatgctgtagattcagggaaaattcccttttcacccctggggtggtattttggatattattaataatagccaaagaaagaaactaagaacaagttgatgctgtgctgtcctagttctaaatccattttatggttttcttatggccaccttccccaaactcccacactgaaactgttgcattattgaatcccagttttagttctttttgactcccgttttagttttatttgacttagtagccttccattatttaggtggttttctgttagatgttcaattcctcagtaagattccaggctgcagactattttcctgttttcagctacattctacatgactgtctctgattactaccttgaatcttcaccttggttcgaggtttctgtcacagctaaagggaaaggaaacagggaccttttttcacccagcactgtcttttaaatttatgtcccaaaggaggattaaaaatcctcctaaccatgtaatatacacctgaaattctagctatggtataacaggtgacttctctaacatggctaatgaactgtagcagaagaaaatgtatccctttttacctgagatttcatagtttgtgtatatttcttagtttgtataccagttttttttcaattggtagtataaactcttaaaaattgttgtttgatccaaagactggtatgcttcagatataaacctctaaaggtgttttcatctccttcctccagttaactggcttttcaaatgggagaaaatatggattctttttcaaaggttgctgatgtcatttgttagtaaaaaattgatttgggaaaaagtaagtttcattcatcagataaacccctgtcaggtgtttgaacagccagttctttcccccaccccttcttaagtgagctataaagaagacctggtgattcactcataggttggccacagaagaaagcctttgttatctcttgctagcagcttttgagcctacctccatttctccagctggatctggagtagacattgttagctaatgatgatcactttactcacttagagtcgttctcctccctgcatcatgccaacaggcttcagtgcccaaagccaaagccatagccctgtgtcagactaccaacatataaagaaaatttctgtttgcaatgtttgatgttcctattgtgggtgatttatttaatttccattattgctctatttaccataattaaaaatcaggagtaaattgcagtatttttcccattgcattttttccaagtatgtttcccaaaaacttactctgtatctaaagcatccagattatggttggagaacctaacatgaaatatatagaataatgatttgagtacctcactctacatattttattgaaaacatgcctcaagcaacattaatttcttctttttagctttcagaataattttgcatattcagaacttatcttcaactaaataaattcttttatacagtgtgctttatttttatgaacactatagcatttcaatttatattaccattttataataatttcaattcgtatataatgaaaatacataaaatagcctagaacttcttttgtaaaattgaggtatatcttatatactgcttcttatatgctaacagatgtattccttataacaggaagacaaggaatgcacaaaaaccaataaatgcaagagctgtataccagaacacttgaataagagataatatctcactatgagaatttcagttcaaataaacaaaaatttaattgccctcagtaatgtaataagataaatttttaagagaatgaaatggaagtagtaggcctgagcactttgttttaaatgcacagatttgaatacacaccatttcgtagtaaatacttttgacgtaaattttacatacagcatcctcagattatggtgcaatgaaattggaaatgaataagaaaacaacaggttttcaaccaaatgaaaaagagaaacatactacaataaaactatactacttgaaagacataaaaaatccccatcaccaattatccagctcatgaggctagcatagcttaactcataattttgttcaactctacatgccaatttcaacaagaaaaaatagagcatatataatgtactggttaatcccaaaaggacctaaaaaagaacagagtaagatagacaaaattaagatgaaaactactgaaatggataattaaaactttttttaactttaaaaactagattacaaaaattaaaaacactacacaactaagtattttgaatacactagttgcaataggaagcacaagaaaattggatggaatcactggtgaatatttttcagtacgtaatatatatatcataggaatagctactaagccgggcacagtggctcacgcctgtaatcctagcactttgggaggctgaggtgggtggatcacctgaggtcaggagttcaagaccagcctggccaacatgatgagacccccgtctctactaaaaatacaaaaattagctgggcgtggtggcaggcgcctgtaatcccagctactcgggaggctgaggcaggagaatcgcttgaatctgggaggcggaggttgcagtgagccaagaccacaccattgcactccagctgggcaacgagagcgaaactctgtctcaaaaaaaaaaaagaaaagaaataaatactaaacactgaagtaacttgaaggttacccagaggttacccagtttattttgtgaggcagacaggtatggtgcctactaaggtcagaacataagattgaaggcagtcttgttgatgaatatagatgaaaaaactctaagaataatgtaaatagaacacatattaaaaggtattcaacaattaaaaataatattcaccatgaccaagtgagatttagtatagaaattcaggattggttcagtgtaagtcaaactattaatataatccatttcattactgggaaaaatagtaaaatcaattaaaacaatgttcattgatctgggatgggatactgttttaggcactggaaggatacaaagagacatatatcagtagaatccttgtgctctcaagggtttataacttattaaattaaaaaagaaaattagtgaaaatcatggtgtgccccaaatatttgaaaacatcctaaaaatgtcttataaaaattaacagactgggtgcagtggctcatgtctgtaatcccagcactttgggaggccaaggtaggtggttcacttgaggtcaggagtttgagcccagcctggccaacatggtgaaaccccatctctactaaaaatataaaaattagccaggtgtggtggtgcgtgcatgtagtcccagctactcaggaggcaggagaaacacttgaatccaggaggcagaggttgtagccgagatcacatcactgtgctccagcctgggcagcagagggatactctgtcttaaaaaaaaataattaacatacattcctgacaatccaaaagtataaaggaaatgtaagggtttttcatatatatttgtaactaagatttaatgttagcctaaaaggaaaagtaaaggcatcttctgttaaaaaataattaaaatagtgcggcctcacatcaaatgttagctattatataaaaattaaaaaaaacaaggtacagatatatgcaaggaggaaattaaactatcagaattcaaatgattgttatatatccagaaaatctgaaaaattaaacagcataataattgaatttaggttgcaaattttaagttaacaaaagtaaagcatgttactgtattttaacaatagatgatatagcaacaaatatatacctgtttacagtgacacacataaaatactttaacataatgttctgtgtatatgtgaataataaaactttaatagcaagtatgaaattagtttgaataaatggaaagttgtaccctggctggtgggaaggccagaagtattaaaattacatgcttactatattaattactagatttaatatttaaccaagataccaatataatatctttagaagccttgattccagcattacctgagaatctctattccccatcccagacatagggaatcaatctacattttaagattttaggccgggcgcagtggctcacgcctgtaatcccagcactttgggaggctgaggtgggcggatcatgaggtcaggagatccagacaatcctggttaacatggtgaaaccccatctctactaaaaaaatacaaaaaaagtagccgggcatggtggtgggcgcctgtagtcccagctacttgggaggctgaggcaggagaatggcatgaacctgggaggcggagcttgcagtgagccaagatcgcaccactgcactccagcctgggcaacacagcgagacttcgtctcacaaaagaaaaaaaaaaaaaagatttttaagatttccaggtgattcctgtttgtttaaataagtggttaatatgtgacctatttggatgaatggaaaaactatatcaaaggggatagaaggaaactgtacagaataaaatcagaatagggcctacaatattgtaaacagttgatattctatggtgatgatttttgttctaacaactttattgaggcataatttatataccatcaaatttacccatcataagtatgtaattcagtgacttttagttaatttatggtgttatacaaccatcactaccactcaattttagaatattttcatcaccccaaagacttgctcattaatagtaacctactcccaaccccaggcaatcactgaaatgttctgtctctacacatttgttttttccaagaatttcttataagtgatatattatgtagtcttttgtgtttggcttctttcacttagcataatgtttttgaggtttatccatatgttaataaataatagtttgttctgttgtatagatgtatcatagtttatgcattcactaggtaatggatttgacactttccagtttttgactattatgaataatgctgctatgaatatttacatatgtctttgtgtggacataagttttcatttcccctgtgtagacacctaaaagtggagttgcagggtcatggtaagtttatgtttaactttttaaggtgcagccaaactgttttccaaggtagatgtgccattgtacagttttaccagtaatgtaaaagggttccaattttgattgggattacattgaatctataagtcactaagaggagaattgtcatcttaacaccattgagttttctaatccacaaatatgaagtgttcccttatttaaatcttctctaatttatctcagcaatgttttgtagtttgcattctatgtgttacacttctttttaaaatttattccgtaagtattttattctttatgattctgttgtgaatgaaattgttttcttaagttcatctttagattatttattgcttatatatatatatcttggaatattttcatttggacttcatttttgaaggataggatcttcttagtctgatatagaatttttgctttctccactaaaatatggcattccactgcctttgacttccattttttctgatgagaagtcagtcatttatcatattgttgtttttctcttgctatttttagagtttttctttgacttgaattgatgtttgactatgaattgtctaggcgtggatctctttgtgtctatcctacttgggttttttgggttttttttttttacaactttttggatctgtagattatttttcatcaaatttggaaatatttcaaccattatttctttttcttcaaatacttgttctgcctctttcttgctcctttcctcctgatattcccattgcatgcatgttggtaccctcagtgttactgcataggtctctgaggttttgttcattttttcaaacttttttcttcgtttctaatatgtacttttctctagaatctgattttgttctatttttgtagtttctacgtctgtgttgatattccctgttgagtcattgtcaccatatttttctttaatttgttaaacaagtctcctttaattcttttttttgtttgtttgtttttgtttttttttgagacggagtctcgctctgtcgcccaggctggagtgcagtggcgggatctcggctcactgcaagctccgcctcccgggttcacgccattctcctgcctcagcctcccaagtagctgggactacaggcgcccgccactacgcccggctaattttttgtatttttagtagagacggggtttcaccgttttagccaggatggtctcgatctcctgacctcgtgatccgcccgctcctttaattctttgagcatatttacgatagctagtttggaagtctttttctgaataggacatctggacccactcagaaacagtttctgtttgttcgtttgtttgttcgtttgagacagagtctcgatctattgcccaggctggagtgcagtggcgcaatctcagctcgctgcaacctctgcctcccgggttcaagtgattctcctgcctcagcctcccaagtaactgggattacagatgcatgccaccatgcctggctaatttttttttttttttagtagacacagggtttcaccatgttggccaggctgacctcaggagatctgcccaccttggcctcccaaagtgctgggattacaggcatgagccatcatgcctgtccagaaacagtttttattgactgcttttttccccgagtatgggccacattttcctgtttcttaacatgttgtggaatctttttgctaaaaactggacgtattagataatacagtgtaacagctctggttctgattttcctcacctctgacggttgtcattattgttgttatgtatatttgcttattcttaaatgacacgtgcagacttaatgtgcagaatctgtctccccactgaggtgtagccaactcgggtctctgctcaattttgttttgttttttttaatttttagcctagctttcttggagtcctgcttgtgtctgcatagctgagtggttggctattggttaaaggttgtgctcaggcattttgagctaataaggcttataccgtgtgtgtgtgtgtgtgtgtgtgtgtgtgtgtgtggtgtgtgtgtgtgtgtgtgtgtgtgtgtgtgtgtgtgtgtgtgtgtgtgtatgtgtagggagagcatgtagttttcaaatatgcccagcttttattttctgctgagccctcagtttttcctcacatgcaggaagcctctcagtcagcaagagatctatggagagttcaggctatctccagtctcctctgggcatatattcagccatcagttagccaggactgtgtgggggagtttagccccctctgtggctctctcatttccagaatctccttgttaaatttctagatttctgatagtctgcccttcttctcaaccaggacagcagcctttgaataacagagctataggctttctctgttcttttctagttgagtttaatgctttgaccccacattgctactgggtgtgggttttttgccctccccttcaaatcatgttagctccctgtgacaacgaagctgctgggttttgtagccagccttgcccaggaactattagatgtactggtgcttgggtagggtgtggcaggggtggggtaagaagctgacccaagctgtgactcccactattcttacacaaatttcagcagttttttgtaaaaacacttaaatttgtcatttgactttggccatttttctggagtcccaaaatggctgtttttgacacttttgtctagttttatagttgttttgaggggaaaggatttgctgacctcttcaatttgccacagctggaagtcctgcctcctgttttgttttgtttttgtaatatttttgggtttgtttatttttaacaggctaattgaaaacctgaagcacatctatatattgtagctgcttcagcattgtgcttcacaacggaagaagttaggagattgtgattagattaggggtggggctgtagtcctaaatttgctgacagcgctttcctgtggaatgcttcctaataatgtattcttgtgtaatgatgaaggaaatgtttgtttttttttaagcaagcagattcctttggaattctacaacataaaaaagacattatagtatactcctctctacagaatgaatttggcacagggagagaagtgacaaagttctttgggctggtatagatgtatatctatatgaaaaataatggaaagactcatccttttaaaaagttactcatccttttaaaaattatacaggtttaagctaaaattttttgtgtgctagaaaattaagctgggcagtttgcctttttaaaaaacctttctaattatttagtaacacacatacacaaaataaaatgtataactcaatggtgtatcacaaagtgcacacctctatgaccaccattcaagtgagatacaggacatcaccagtacccagaagtcccctgtgccctctggatccataccccaagagaaggttcttggatctcacacaagaaaaaattggggcaagtccatagagtaaagtgaaagcaagtttacttaagtaaaggaataaaagaatgactactccataggcagagcagccctgagggctgctggctgcccatttttatgattatttcttgattatatgctaaacaaaggatggattatttatgcctcctctttttaggccatatagggtaacttcttggtgttgccatggcatttgtaaactgtcatggcactagtgggagtgtctcttagcatgctaatgcattataattccagaggtcactctcatcaccatcttggttttggtgtattttagctggctgctttactgcaacctgttttaccagcacggtctttatgacctgtatcttgtgctgacctcctatctcatcctgtgacttagaatgccttaacttcctgggaatgcagcccagtagatctcagcctcattttacccaacccccattcaagatggagttgctctaattcaaacgcctctgacactctaccaccattgtcctctcctcctgagataatcactatcctaacttttatgctaactacttcctttcccgacagtttctatctcctaagtgtgcatccctaaacattatagtttaactttgcctttttttttaatattatggaaatggtatcttgtagtgtatatttattgtgcctggtttcttttgttcaaaattatgtttgtaagatttatctatgttgttgcatatagcagtagttcattttaattgctggagagtattccattgtttgaatatactacaatttgtatactgtatattatatattgaacattctgtttgtggatatttaagctatttccagttttaagggtattacaaatattgctgctctgaatacgcttgcatgtgtcttaatgtatagatatgcatattccttttggttatatacctaggagtcaaattgccaggtcatagtgtgtatatatttttgacttaatagataatgtcaacttgttttccaaagtgattataacaatttaccctcctaaactataagaatttccattgcacttcatctcaacaaaacatttgctattgttagacttttaaaaaattgatttgtaggagttctgtatacatctggataagagccctttgttccttataagtgttgcaagcatcttctcctatgtgacttgcatttttgccctcttaatgtagatatgaaaagacgttcttgattttaaggtagtcaaatatatcaatattttccagtgtaattagtgctttttgtgttcaattgaagaaatctttccctgccttaatatcatattcttctatacgttatcttctaaaagcgatgtgattttgcttttcatgtttatatctacatcctacctggaatttgtttttgtgtatagtgtggagtaggtttggaggttcatcttgtttttccatgtggatatttcatggttccaataacatagattgaaaagatattgtatctggcagggtttgatcaggagaaagaaaccacaccagttatttaaacagagtttaatatggaaaaaatgttaattaggtataaagttgtcaagtagataactaaaaatgcaagaagaaaacactaagatatcacaaaagtagcagtttccaccccacagcaggaagaataaagggaagagattggaattattcaaatttagaaccccatgatgtctgaggagaggatactggctcacttgtgctggtatctggcatggaagatgcagtgaggctagttctgcaagttttggcagaactgtaaactggattcagctactgctataagaaggtactactgctgggagtgaagaagtattgcttgggtgtcacagaaacaagaaacagacaggaagcccataggaggtgcaagtcccttcttcctccaccaccacccttgcagtctctctctacaacattctgttggcagagcctaacatggagccagttggcaaaaccaaaatgtggtttgtagagtttagccccagcatgatagagcagtgtttaggcggatgggtttgaagctgagagacaatagcttaataactgatacaaccttcctgtctccactgctctgcagagccaactttttggtaagtcaagtgttcatataggcgacagtctctttttagattgattatatttctgtttcatctgtctttgtaccaatattacactatgtaaattactgtagctttattatgtcttcatacctagtagagcaatttttcaaaaccgacctatccttcttcaagtgttttagctgtccttagcacacttaaatttatagaaaaactttaaaactacttcatctatcccccccatcaatttggggggagttgacaattttacaatgttgagttttctaatctgtgaatatgatacatctttccatttattctttaattttgctctgtaatattttttaaacatcttgtatagaagtcttgagtagcatctgttagctttaatcccagatattacatatttttaatattataaatagttttttataaatttcattttattatttttattttgaaaatttcagacttacattattttccttttgtataattagaccccattatacccaccacctagattcagtaattaataagatttgcttcatttgcttcaactattttttattgttgttgctgaagtattttaaaacaaatcctagatctcatgtcatttcacctatttatacttataagtatgcatctctagaaaatacggacattttatttataactaattctaagccatattgacatttcctcatttatatttttaaaattttttattttatgtacaaagagctaacatggtttctatcattgggtggatgccttggataattcattcaacaaagatcatttggtccaacttaatgaaacctatatccttcatgtactgatggaaacactggcagcacctattgaggccatgtttcaggatcagaccatgctggtttgagcagacgcagcaagagtgagaaccccggccgaattttcatgggtggctctagtagagctgctggtgacccatcttgctttcaggagtgcaaccaggtgaagggcctcttttatttcaaaaatgttttttactgttgatatgttcaatttacttttaacttcaagcatattgttcacattttgtattaagtaattattaaaatattagcttagccattaaaatattaaagtatgctctacgacaattcagaacaaagttttcttttctgatgtgaactttatttctaaattcattaagatttttgacgtctgcaaagccacactgtcacaaacctaccatgtgaataaaactgtctttttctttcaaatgttttctatccttataaacctaatgtgcaacaaaaattgccatttgttaaatataaatttttttctagtcctcaatgttcctattactgaacacatatctttcaggaagtcaccagtggaattaaaaataagtgcatttttgtgtgacatattttcagttttacttgcgctttgtgacctcttcttgcctagacaaagttgttaaaatgcaagagggagatgtagttgtgaattgttttcctttgtggatttgcatagaaacctttccctcattctttcaactggttttcctccccatgcaatattcataggtctgtttctaagcaaggactgtggctagtaggccatgaaaacttcctagacttggcagactgggctgtatcatcttcaccctctaacatgagaaaatccagcatggcagttttcctgcaggcagttcagattcctcgtagacatatttaacagtgactgaggaggaagtctctgtatctccccagcatctatagtatagatggaactaattaattcatgatctaaagaacaattaaatattcccaagaccacaagaattagcataaaatgattttcagctgcattttaacttatccagtattattggtggggactgaaagggtcttaagagttaggtttcactcactagtactaagtacttgaaaataaatatgacagcctgatactggatggcttacctgttgcttagccttcctccattatcagtactttcaggtgtctcactacagattagaatggcccagtgctgtcttatctgctgagatctttgctatttttagttcattaaacacagagttagaggatgtttaagttcttatttaactctttcagtcaaatatagatattttgctgctcctaaggaataatattaggaggatatgaagaaaagaatgaactgtttctcagccttggtttagctatcatataaggccttttttctttgtaatacaaattagcaaatttgggaatcattttatatatcctgacaaaatggaaaaggatctctttcttatgcatacagctaacccgacaattaacaaacttggataaacaaatgagaaaagaactcggctaatataatacattaaatatagaagatgagaatccgttttttatttatgttttggatgggggaaaggcctagaaagatttcttctaaattgtatacaactctataaatatggtggagtgcacacaaattatagccctttaaaattgcagttagaaagaccagtgagaaataaaagtaaatttcttattccataatttgttacataaatttcttgtgtatccttgaatatataacaaggaccaaggtaacaaataggatacatttcctagacttgtttgttgtcaaaaattttgcctcagtttgctattgttttctgaaacaggcaatctaaatacaagtaaaaataaggaaatgaatttcaaaataaatgtgacggcaataatctaaatatttagagtttagttaggaggttctgttactgagatatgtactcagtatagttgacatagtaattgtagtatgtatagcaagaaatggaggattgctgattacaactttatgtgaatagaattacaagaacctgattttcttaaaccaagttgaagcactctttttattatattatgtatttgctttgaatagctaaaaacatgtatcagaaacatgaattttaaaactgctaacacatgggggattcttcacataaaaatgaaagagaaacacaatttcttggagattcttgctgactagtttaaagatgttttaagtgacattttagtggctgagaaagtattcccaataataagtttcacttttgtttcattacaacttttctgcttgtcagtaatttaagcagatttgtggcagtgttccgttttctgggattaagaaaactcaacaaaatgaccacaacagatctaaaatgcttcctgttttgttattgtactcttttgatcaactctgtatctctctgaaaaaggacttgtggattcttctggctttttaaaaaacagttgaatttatgagtataaagaagtattgataaactctggacaggtgtaagtgaggattctttctcacgactcttaaacatgctgcttgaagtattaatttaaaacttaggaagtaaactcctgtaagtaaaacttcactgtttaagaagggaatcagatgaaatgacagatgcactgtcttatttaaggcatccagtgtttagcagagaaagtaactgccctagaattgtaggtataaggatggctcctttttttctgaaatgaagaaacttgtactaaatgttgttcattatctctacagctggagcttcattagcaagtgcatttagaataaccagggtatggcagcagcagagaaactaagcgcctcaagcctttgagtaacaaaaaataaaagaattcctgtataacatgcttccacacttatctgtgttctgtggtactgtttgtgctgaaccaaagcatctgctacctcaagttaagagagaacaaactcaacatggcgtgaaattactgcactgccattcacattcattagagttatattgttgccagccacaggcatgactggcttttgcatgaataataaaatgctgctttgtgaattttactttaaaacattacaagacatagtactcaccttgagcctgtgtcaagtattttcaggagtgggtttatctcctttattatggtggcttttctcaccataatagggtaaccagtaagtagtagtcagaagttaggaagaagtattgtatgaggcctttggaaagggcactgtgttaaatcaatttatctcatgtttaaaaactaatatttattgtgcccggctaactgttaaagatattaaaattattgtcatttggcaaccatcgtaataattgattcaggcaaaaatcatgaggggatactaaagttaatggatcaaagttcagtgaggaataggatatttacacagttacaaagggaaaaaaatagtaactttatagtggagaagcctggcagacacctcattcaagtgattaaagttatcaacagtaatgggacatactgacattatatgcctcctgagatgatgcactgagaaggcatcagttctttgttgtttctgtcaaaaatgaataatctgaatctagttatgagaaaacaacaaacccaaattaagggctagtcttcaaagtaactggcctggtctgtatatttcacaaatggcagtcatgaaagacatgccaaataacttctagattagagaataccaaagagacgtgacagttgaatacagtgtgtgatctgaagttttccctttttcgtatttcattgacatttttctcttctagtagctagatactgaagtagtatatttaaacagaaaaaaagtacttctaactaatagtctgaatacagcaatatatcaatgtcccctcctattttctagtttatgtggattttaatcagtattgcagatttggcttggggtgtgtgtgtgtgtgtgtgtgtgtgtgtgtgtgtgtgtatgtgtgtgtgtaaaatacagacagggtctcactgtgttgcctagactggtctcaaactcctggcctcaagtgatcctcctgtctcagcctcccaaagtgctgggtttaacaggtgtgagccactgcgccctgcctgggttcatattttttaagcaacagtcatgaatgttaggtctcctggcctacttgagttacatatgaagctattgaaaactcaaaattgcctgtagtcccagaaggctgaggcaggaagactgcttgagcccaagagttccaagctgcagtgatctttaattgtgccactgcactccagcctgggtgacagtgagatcctgtctctaaagaataataataatagataatacttgttttatcaaaatattggccaatggaagaaagtgaagtcatcgtgttgttaaaaaatactagaatactcagtagagatagcaccatgttaaggaaaaaaaatactagaatacatcatttcagagtttcatgagcacttagaaaaggaagtagtgatcactaaaatgaatccataaagaagtttgatatggtttttagacagatatgtagacaataggaatttttattttcaggaaagcaatttgatgagtgtctgatttcctgagtgattgtagttcattgaatgagtaattgaatatccatactcaaggttaatgattgaatgtcagtctcgttgatgatttctagtattgtatctgttgcagagatctagtctcagtcctgttctaaactttaattaataacttagaaagagacattaatgtcacatggatcaattcttttttcttttttttgaatacaggcagagtcttgctgtattacccaggctggtctcaaactcctggtctcaggcagtcctcctgcctcagcctccgaaagtgctggggacagaggcatgagccactgagcctagcctcaaattttaaaatgacacaaatttaggaggaataaatactcagagcattggatgatcagaacaggggctgaacgataatagctgagaatgttaggcaggaatctagctaaataaattggacaggaataaattctaccagaacaaccaatcttagtatgataggtagaaggggggaaaaaaaaaaaaagctctaggttaattcatggaaagtcagtttgccaaatgaccaattggccgtgtatactcaatttattggtatttcttttttctttcttttctttttttttttttttttttttttttgagacagagtctcgttctgttgcccaggctggagtgcagtcaagaaatcttggctaactgcaacctccgcctccaggttcaagcaattcttgtgcctcagcctcccaagtagctgggattacagacatgcaccacgcccggctaaattttgtatttttggtagagacggggtttcaccatgttggccaggctggtctcaaactcctggcctcaggtgatccagtcacctcggcctcccaaagtgctgggattacaggcatgagccactgagcctggcctgacattcttttacctatttagttaatatgtatcaactgggttcagtcagaaaaacagaaaccacactcctatttcaaacatagggaaatataatacaggaaattggttatataggtgttggaaggcaaaaagagaaaaaaaagggagtggggggacacagttattaaaaagatagtaactgcaagaagcaactaccacactaagagctgggaaataaaagggatgaggttatcattactcgggagctacagggatccctaagctggcacccagacttctaaggaggggacagtgttcaactgctgcttatattgaagtccatattactaaaagatgttcatatacataagaaatctaaatatttaaattgtgtttgaacatgtcttccctctcaaatgtagttctgaaaataaagcataaagctaatttgacttttatcaaattaatgatctatgctgcttctgtatgttttttcccatctttaaaatggctttaccactaatacctctcctacctcagatgtataaagtgacctctctgaaagagtaagtgtttatagaaatttagacagggatttttttttttttaaagcatggcagatgagttgggtgaccaaacattctctttaattatagatatgtactcttttatctttctcactgacaccttaagcttcattaagtggacttaatgttgagtgttttaagataaagatattgtcatgatctgaaacattggaaaacaaggtgtggaactgatttctctgtcttttttttccccttccccaaatattgcttctttaggtcagtaacagatccaagagatggaaagagagtagcgctcaaaaagatgcccaacgtcttccagaatctggtctcttgcaaaagggtcttccgggaattgaagatgttgtgtttttttaagcatgataatgtaagtgaaattggtatttgggggaaactatttcctaagcctcctgcattgaattagtaaagagcagatgaaagtttaaaagggcacctataagtaaaatttggaaattggctatagttttatgccaaatgtgaaaagaaataagcgcaccagtgaggttatgggagaatacctattgataggctttcaattcatacattcttattgaaagagatgcacacacacacacgttttctaagctgtagtctttcagtgctttgctttccttttatatatactctttatgtctctctatgactgtcttaaattttcactattgagattagtggttttcaaccttaacatattagactcacctggggagtccattttatcagcattttatttgaaggtttgaaaattacactatgaattgtatgacatgcacaagccctaaactccaaatcaggaaacgttgaacctattgagtttcgcattggcttctgaaatgtggtgtgcactctcatttgtcaatctgaatgtcttttttaattctaagaatacaagctattaaatatgtttaaagcccatagaaaaggagcatatatttgtagggaaataggttattaatagaaaccacaaccaaggtttttattgaggggcttggaaacctgagacaaattagaccctttttgtgactgaacaatgaacaagtgtaagtgaattcaagtgaattctaagattgattgattgacaggtaaatattgatgcaaagcaaatattgatatttagccgaggaataatactaatattcaacacaaaaatagagtgtagtgatttatatagtgagtgatttaagtggaaataattgacccttgattttaagtgctttatttttatctcaatattttaaatcagagattaagttagagatgtgggaaacagtttctcctataaaaacagtacatcccttaaggtaacataggctaccttatttatggctatgtttagagatgtgaagacttatagacaaatagactcgtgttttgacagaactttccttcaattaatcctgagttaaaaatttgatacatgtaaaatttacctggaggtcgccagcattagaatatgttttcattttcatgtgaaaagaaaaactgcctcaaattctttatataatactcaacctatgctattttaattgccataataaaaacttatcagaaaaaaaattatgatttctcatgagtctgagtgcttatttgcacaaaaaactcgagaactttggccaaaggtttggtctcactttaagaagcaaattttgaaaagtttgaggtatttgttaaaactgggagtactaaacttaccatatggttcactcgaagctccttggtttgacatatttcattttaatgattattcctcttgaaattctcttgccttaatttttttaaagggcattgctgtgttttagtcaattggaactgcctagcaatatgcttgttttaatacatttcaaaataccacttgaagccagggacaatggctgcatctgtaatcctagctactcagaaggctgaagtggtaggatcagttgagtccaggagttcaagaccagcctggacaacataacgagacctcatctctaaagaagaaagttttttaaattagctgggtgtggtggcacacatctgtagtctcagctatttgggaggctgaggtgggaagatcacttgagccaggagttcaaggttgcagtgagttatgatcaaccactgcacttcagtctgggtgcagagcaggactccatctctaaaaaaaaaccacacacacaaaacaaaataccacttgagttactattttactaccagttcctcagattttagaaataatttagaataatgtctagttctttcttagttatttcttgaccttgccttagtgtgtcacctcagcatcaaagagtgcagaccttctttcattgtcagagactcaagtaaaggtatccatgacgaaaaaatatttcaagggtggcatcagaaatttgcttactcggggccgggcgcagtagctcatgcttgtaatcccagcactttgggaggccaaggcagctggatcatttgagtccaggagttcaagaccagcttgggcaacgctgcaaaaccccatctctacaaaaaataaaaaattagctgggtttggtggcacatgcctatagtcccagctactcaggaggctgaggtgggagatcacttgagcctgggaggcagaggttgcagtgagccaagatcacgacactgcactccagcctgggcacagagcaagatatcacctcaaaaaaaaaagacaaaaaagaaatttgcttactaatgatgtcaatggcttactatattccaaccaatcttggcctcttctataaaggaagggtggtataataagctgctgtttgtctagttggtatttttgctcatgactcattcctagtaactaattaagttacaaagacagtgtcaaagggagtagtgtaagaaaaataaactgaatttgtgaaaatcacaccaattaaaacatagaagcaattctcatacagtttctaagagctgtgctttaaagtcagaactaggtttgaattgtggttctactattttgtactgttgtgtcttggaccttaacttctccaatctttaagtttttttcattttcgaagcaggcatggtaaaagcagaaataactgtgtatgattgttgcagaaattaaatttttttaatgcatataaacctgctcaacacacaaccactatttgaaactactgagctctatcatagaagagtgcctgtgacatctgtgaaagtgtttaaaagtgaggcacatagttgaagatggcacagcaccactattttatatataatagatctctgctatctctgagatctatttccaaaaggatctcagggccagcataactactatgtgtggaatgccagtctaagaggcaactggtatttgatctagttaaggcagcaaatgtttatttattgtgtcctatgtaaggagtgcggtgctaggtcatgtggaggatacaataaaggcttaaaacactttctttttgaaggggtatgtttaatattgctctgtgtcaggagatatgctagatactttacatatattaattaatttactccttaaaaatcgtgtcagatagggcttgttaaccttactttgtagaggaggaaccaacgacttggagttacgtaacttgcccaaggttaaggtggcacagattggactgtaaatctgtcttgctgtagagcccatattcattaattcagtaaacttttattatgcacatcctgtatgcctaaactacattagctcctgttgtctttaccttcaaatagttgaaataattttcaaaatgtgataactactatgataaaagcactgtgggagggttgcctgcatggttaaacattaagccaggacagctgtgtgcatagcaaagagctggacaaccaaaacctagaaatgtattcaaagattccctggagagggggaccttaaaacacagattcatgggtcttaccttgcacctactaaattgtaatctctggagttgaggcccaggtatctgattttttaaagcttctcaggtgacaggcaagtaccataatattaagaaaagagaaaaattgttgtggacttagaaattcaaagatgcatcaaacacagagaaggaaaatcttaatatgagccttttgagaacaagatttgattgaagaagaaaggaatgtcatgataaaaatggcatttagaaagatcttggtcattgtaggaaggttggattttaatttggatggctttttatgtgtcaaagaatagtaacaaagcctgggaggctttggattttcttttgaaaggaaccttcaaagtcactgtatcaaattcattgatttcaggtgacctgactgaatttttacacacatacacacacacatctgagtacctgcttcaccatcttaacacattcaccttgatgaagtaacttggggaaacagaaatgggtttagctttctaaaaattggtgtttaggcttattactagtatctatctgagcttttgtaaaatctggcagaatcttctctctacccatctatgcatttgtgcttgtatgtatatacatgcatagttgtcatatgatcagcagggaaagtgatgatttaggttttttggatctttgagatgaaagctatgaatcctgtcagaaaaatgcacatatatacaattttaatgtcattttaggctttcacttgtcctctaaagcccatttagagcccccttagggtctattgattcctgccaagagcccctgtaacgcaagtcttggacatttttcttgtctttagacaataacactaagtacacagtaggcggcgattctatttgaagagtaagtgagtgaatgaaagtgacagaaaaaaagaaatctaagggcctggagtgataacttctgtgatctctctcttggggttactttttcttgtcctagctctggagtgctccagagagggctagaatgagacaaagaagcttcattcattttcctttgtatagtctgacctaactcatacaacacccctttgggttcataagtaggttacagaatcatacagtatgggaaaaacagatatggcctatcttttaatacagacatgctgttcagacattagtaatactaagtgctaactaatactaactgttgtgccgctaaggagttggaaaaagcaaaggatgatgtagaggtaggttacttttcaaggaatttggttttgtttgctgtgtgcctaaagtttatagttctaggcagattactgtcacatttaaaataatacagtctcccatgttaatggattggaagactcaatgtgattgataggtcttttcttcccaagtattgctatacatttcagtataatcttaatcacagtcccagcaaggttttatgtctatatgcgtatggaaattcacaaacatcctgaaacttatggaaatgcaaaagatacaaaatagcccagacaatcttaaagaagttaaataaagttagaaattcatactaccaagtattgagactgttgtccaatattgagactgaatcccaggagcaacagaaggtataaagcacaagatatggagccagaacaaggatagacagatagattaatggaacagaatagaaagtttgtaaactggcatactatatacatgttcacctgatttgcaagagaggtgccactataatccagtcgggaatggatgaccatttcaataaacagttctgagtccgtgagatatccatattaaaaaaattaaccttagccatgtaccatatacataaattaattcaaaatggatcatagacttaaatgtgaaaggtaaaataataaaactcctagaataaaacataggcaagtatcttcatgactgagataagcaaagatgtcttaactggacagataaaacacccataaaaaattgtttaattggacactattaatgttaatttctattaacattaatgttaagaactaaatgttcaattaagagaatgaaaagacagacctcaaacatatatccaataaaatacttgttcccataaaatattatgggctagaacaatttttaaaatattcagtgtttgaggaagacaattagaaataaatgttttacttgatatttttcagactgagttatatatctaaatatcatatgtaaagaccttctataaatgaagacgttttgcccaaagacttaatgaaaaatttcacgaaagaggataacatatcaaagtgttcaaagtcattattcatcagagaaatgtaaattaaaacgacattgagttaacactatgtacccaacagattggctgaaattaaaaagactgacaataccaactgctggcaaggacatagatcaactgaaactctaatccattgctagtgagagcataaatttgtaaaactacttcagaaaactggcaatttgtactaaagctaaatatacacctacccaatgacccagcaattctatttcgtatacactcaagagaaatgaatgcatatatttactaaaagagtgtacaagaatgttcatagcagcattacacataataggtagcaattggaaacaatataaatgtctgccaacagcactctgaataagtactttgtgatatagtccagttcaataatagcacagtacacaacaccaaaaaggataaaccactgattcacacaggaacatgaatgaatctcacaggcataacagtaaatgaaagaatctatacacaaaagacttcactctttattatgcagtttgtgtaaagttcaagaacacacaaaatgaatctttggtgacagaagtaaaaacagtgccaggatgggttttgactgaaaaaagggtaaatgggctgggtgcagtgtctcatgcctgtaatcccagcaccttgggaggccaaggtgggtggatcacgaggtcaggagttcgataccagcctggccaacatggtgaaaccccgtctctactaaaaatacaaaagttagccgggcatggtggcgcatgcccgtagtcccagctacttgggaggctgaggcaggagaatcgcttgaatccaggaggcagaggttgcagtgagccaaggtcatgtcactgccctccagcctgggagacagagcaaggctcccgtctcaaaaaaaagcaaaggggctaaaatgtctaatttcttaacctgggtggtatttacatagaaatatgtgtgtatataaaaatggatcaagttatactcaggatttgtataccttatgctacaactctataaaaaaaaataataatgatatagtctctaccgtaaagaacttagaatctattatggggagagagtgggaaaagagtagctcctttgctaaatgggatttagctgtgttccttatattcttattcttattcttattcttgtctttgagtccttggcagagtagaaactcagtaaatgttgattctatgaattaacagataaatttcttgtctttatagttaggattgagattattcacaggaattattttattgataaagggctgactgagactaagctattttcttatgtaaccagtttatagtgaatcttctaacatcatggaggttaaaatcctaaaaagcagctaacataatgagcttttgtgtttcttaaaagatttgtgacatatgcagagacactgttaagaaatgtgtttggtaatgactatcatttaaagacataactttaattcattttttaattagacaagtctgcttgtatttttttgtatttgaaatcctttgaagagtgtggtatttgaggatacttcaactctttataagccaaagtctttacaagcacgtatttatatcttaaggctaatctcacatactttattccctcaaataatagtggggcttatagagaatctctagctatttaaatggggtgtcaggcatgaagtctggagtttcgaactctgccactataccttctcacttactcatttacattgcttttgagattcctagatcatttctactggtctaaatactgtttttaccacctagaagcactgtagaatgccatcctctgataaacattttggagtagaaagagcaggaggataaaacaacaggcgtttaaaaaattccaggcatagtttaaaatattgtaccttttgaactaacaatcacagctaaatgctgtagtgcaaatgtctatccctgttttatatggcttttttacaaaaagcctcatcaaatatggagtaagaaagcctcattcttctctatcaaggtttaatatgtatggttgtcactttcttctagataacctctaattatagcagatagatttgaagtgtaaaatagctttgtataatggacgctgtcactcattgcattctgtttcccccttagacaggatgtgtgttgctcagatacagagttgagagtccgaaagatgtcaagtaaaacactaatttctaactgccttcctcagttgtcaaatattcatgttaaaaattgttctggcacataatgagaaatttgtgtgaatttattggtttaaaaaatatagctggctaattataggtttaaaaaatatatagaaatgaaataatgcatctgtcatatgaaaaaaattactcttcaaagaaactggaaaatctcttattttctgtttataccaaaattctaaatataaacattttaattcaaaaggaaagatagatattccttataaaaacatctaaactatttaaaagcctccaactggctttaaagtgagtgaagaatttttcattacaggaggctttaatgcataaaataaatttttacttaaaatttatagtgagaaatgcttggctgaaacaagaataacctttaaaatgaaccgggtttcttctacacataaattgcaagaggaaacggaaaagagatggtggagaaacctttagattatcagtcatactatgtaaatcttatttagctcctgatttagactaacaaactttttttttaatatgagaaaatagaaaatttgagaactggatatttgatgatatttttaaacacttacattttagatttgatcattgcaatttttaacctttttttcattagagatactgattatggctgaaataagtttgatatatgcttgagaattatatagggagagtaaagggtagagatgaaataagaatgttcatgtgtgtgaataactgaggccaggtattgattacatgggcattctctatactattctgcccacttttatatgtttgaagttctctgtagtaaaaaaaaaaaaaaaaaaaaaaaaaaaatttaagctacagatcataaaatttgaactagtaccacacaatttatttcctgttaagtagtttcttccatgtcctttgagcttggtatttctcattagcttagcaagacagctgggaggggatttgtttgttatgttttgatggcggaagttacacgggtactatgctgcttttataaaggacttgcgtcgtaaagtcttttttcctcaccctagtgacttcttttcttacaagaatcttggaataaaatcaaaaatgcttagtatgatttaaagagactttgtgtagtgtatttcatgtcttcctcttctactttatgttagtctattttcttcctaccctctatattcaataagcactggcttttctgtctctagaatctgcctcagtgtctttacactgcctgcccatcgatcaaccaactgccactcagccttcaaattctagagtagtgttactttagggaagctttttctctctacccttctttacatttttcctccatagtaatagatgttgtaattacatatctgtaactgtttagtgcttacctcttctgtagtcatgagagcagggatgatgcctattttgttcaacaggataacctaaaagcttagtgcttgccaggtagaatgcacatagtaaagatttgttgaacagaggaataaaggaatgaatgatagatgtggcttctcacgctcttagagtaacattgattgtttaaaatagggtgtttatttcaaaaactctctcctgtgcagggattttggtagcgtgtggtgtaacccaattgcctctctcattttgtaagtcttttggatagtaagtgtacgaatccatcttaatgtttagtactgtgtttcttgacagacgaatttaattttcagtgggcaattgtaactaagctttaaagcattaaagagttgttagtatttacttgcatttatgtcgaattttgtttccttttttgttctctaaatttgactttttttttccttttctcaggtactctctgcccttgacatactccaacctccacacattgactattttgaagaaatgtatcctaaccagggaatgtgaaagaaggggacaatttttaaaattaatttgttcttctagcaccttttggggttcatgccttcaagtattttaaatctcatccttgcagaagtgattgagtacctggaaccaggtaattttgaaatcctgtgtgtctggcagagctcagtattatcaacatatcctgtgtggtgatgccacagaacagaacatctgaacagatatttaatccccacacagccttatgagatagattattaccatccccattttgcagatgaaaccagtgaggcagctgtgttgtagtagaacccaggaaagtgcttttaccactatacaacagctgcctgtcggttaagagagtaatactgccctttattataacacttggggtaagatagaaattgtagaattaatgtaagttaagttgtcttatgttccttagaatgatggtggtggtagtggtgatattgacataatagccattacttatatagtttttatcagatgccgggcacaattctaagctctttacacatgtttatttaatcctacaaacattctctggggaaggtattgtgattattcccatgttacagaagaggaaattgaggcacaaaaggtaagaaaattgaccaagatcacagagctagtaagtgtggggatggagatttggttccaggtattctgactatgtagtcttgctttcagcccttacctatgtgattctcaggctagagcccttaacgttctcctgttactactgttgatgtttaaaaatagtatgttagacattgtgaataataatgaactataaaataatgttaaaataatgcctggtgatagctccatggtaataataaaataatgcatggtagtagctcctgggactgtgcatgaaaaaaattgagacataagttaacctccctgacattcctgggcaaagtgtcaccagtttccattccacatttaacttggtaaagctttaaataaaagacaggaaatcctaagtcattgattttggtaagctcatgatagtgcagtttattcaaactctaggcttttttattaatactttaggcctatgactcagaatggaaaccaatgtaatagtgagatactttttctgattcaccagtgaggtaatgaaaatctcattcttacacagggggttggtaattccatatgagattgttatctttgataacttcctagaaaataggaacaattaagagcttcccaagagaactaagctgggtaaggatttgggaaaccttatatggtaatagaattgtcactgatcaacactgctgggatgttttgatcttttaaaccaaaagctcttgaatgctagtcagccctccatagatgtgaaactgcatccatggatgaaaaatatttgaaaaaaaaataaaaataaaaaaataaaaagtatagtgggcacagtggctcacacctgtaatcccagcactttgggaggctcaggcagggtgggcagatcacttgagcccaggagttgaagaccagcctgggcaacatagcaaggcctcgtctctaccaaaaatacaaaaaaaattagctgggtgtagtggcacatgcctgtagtcccagccactcaagaggctgaggcagaaggatcagctgagcccgggaggtcgaggctgtagtgagctgtgatcacaccactgcactatagcctgggcgacagagtgagacctcgccctcccgccaaaaaaaagtgatacaaattaaaaagcaatataatgactacttacatagtatttatattttattaggcattataagtaatttagaaatgatttaaaacatacagaggattggatacaggctatatgcaaataccacaccattttatataagggacttgagcatccatagattttggtatcctccaagggtcctggaaccaatcccccttggatactgaggggaaactgtaatctttggtgatattttaatccacagatcctttatggagttaatccttttgtgcagtgaagggttattggacttggggtgccccagctctgcacattccaaagaaaagactgtcccttgactggttcctggctgacaagaatgtctttgtatagctgaaaccttgaacctggccagatggttctgacaaactcttattttaaaagtacaaaattaacctaagggtagaaggattgagaaagttcttttctcctcaactgtaggtcagtagtagcaactgaggagaaagcattaatgattccatttcatagacttcctgaagattacctgggtcttcattgaagaaaaggagagagctggtgggaatggatcaccacttgtttcattcagcagaagtaccttcttatacctggccaggagctacccctctttattctttttagttggtgggaaagaaatccatatagtagcattcctatcagtgtgtagtactgtttctgtctctttggaaatgaagttgctgaaaccaaaccttaaaattagaagaaatttcctttattaaatatgaattttgctatattttagcatgtgttgggggttcccaagaccaccctcaggctcagtgattcgctagaagaactcacaggacccagaaaagctgttattcccttggtgttcaaggtttttattgtgggtcagtcacataggcatggagcacccatgtgagtgaccttagctgccgagtctccagccctcctttttcccttcccctccagaggtcaaactaatatggcgtagcccaaggccccagacaaagacaggtattcaccgtatatcatattgttagcataaactatctggcatgcccaaagccccaggtatactaagatactattgtcaggtggatattgcagtggcccagaggttatttcctagaagtcaggggccagtcttgaagactttcggaatgtgcagggtttggacagcccaggtctgctgagttaaccctttactgcacataggccatatgtgaagaaagaatgtttccatgtaagataattggtgaatgtggatatattgaataaatgccaaagatatttaggttctcttcattgaacacttagttaattcattatatccattttctaccttatagttcaggcacatattgtttatatcaggcattaattttggtacttggtttgaaaactgtgtatgtgcttctgtaagataagagttctcagtcacttattattattggccataatttaattgagtctaggagatctttgattcatcattatttcaaatacttacaaaacagagggaaagttagcatagttatggtttaaaaccatgagtgatataggttagtagctgttggtagcaaatttcaacccgtttcatcagttagaatgtttctttgaaattttcctcctcaaaattgttcgcagatgtttaagtaaagagcctttgtcaaaaaatattcatggaaccctctggtataccatttacttaaatgttttattttatttcatcctatcatatcacttaattttttagcttcaggttaaaaaattgacacattactctcacagtaattagctgactacagatggaaaaatcaaatctttcaaacctaaacttcagtagtcttctgttttctgccttataattcttagctacatgtagaagtatgcatagaaaaaaggtaagcattttccaatagtggtgtcaattggaaaaaactgaatccttttaacataaaaaggaatcatacctatagcagccacaggattataaagactttttaggaaggaatgatttagcttggagtacaagatactgaaaacttgtattatagaacaactattaaatgaaaatgtaagaaataccttagttacatatatgttctgccttcactgctgattcttttagtgtcctaaatgggaagttttccatgtcctttgttttgttttgttttgagacagaatttcgctcttttttgcccaggctggaatacaatggcataatctcggcttactgcaacctccacctcctaggttcaagagattctcatgcctcagcctcccaagtagctgggattacaggtgcatgccaccatgcccggctaattttgtatttttagtacagacgaggtttcaccatgttgaccacgctggtcttgaactcctgaccacaggtgatctgccgctttgttggcctcccacagtactgggattacaggcatgagccactgtgcctggccatgtgtcctgtgtttttgatacaaataaatttgttgtagccaaagcaaaaaaaaaaaaaaaaaaaattcctcagtttcctctttttttctccttgaaaaataaaaaacctattacctaaaacataaaaatattaaagattaataggacctcaagttactatatgaattcagcatactatattatctatgtcagcagctccctctgtagtgtctccgaaatatggcgcacacattacaaatggctttagatgttttttaatttggaggattattgtgtctacagattttacagtagataatattttgaattttaaataagtgatcctggaattatgcttttaagaaactatttttgaggtctgtatgaagtgctattgttttaggcaagttcttagtatatcgttatacatctaatgggttctttaatacttagttgaatgggtcagtacatcgagtcaaaaatatatatttatattacttaagttgtgagggaaaataaataatcctaagtaattatccactgtacataaagtaccacatcattacactttttctaagattagaaaaattgggatatatatcacatattcaagttttaatagacaaacattttaaaccagcaggcgcttttaaacctaatataatagttaatataattttagaaaatttgagttctgtgtgcattttgatgtaatcagatgtaaagtaagagtatcggtgtatagtatcatgcagttaatcatgtatttcctaaaagagactgaaactgtaataaaattattatgccagtgctcaccaaaaatttagtgtgggttttgaaacaccatgcatttttagataactccttgaagcaacaaaaaaaaagtcaatatctagactgtaagtttttataaatctgcctacagggttcaacagatgtagggcaagtcagatgtgaaaggagcaataaattctatcatgacctctgtatcttttaactttttgtcttcatagtttttaatctatctaggaaatatattatttaataattttaaagattatatatttttctgagctgatgttagcttttaaaggattacatttttcattttgtactttgagtttctatttggaaatctgtatgcaaacagtttggtacttaattactttgagcctactgaaatttaaatcaagagaaaccagttctaattgtttattagaaaacggagtttattatgcttcagtcaggattctggatgctctacaatgcacattaacaggccccttcccagaaagcactagttacctacagggttggaaataaaaatttggtctgctttgggaaaagcttatttttaacttgaagcataacttagcattctatgaagacgaacatgggtggtgtgagtcttctatgctagaagcaattacattctaaactcagtggaaatgagaagtctagtggagtgtccgtacacgctggtttgttgggacagtcttggattttacttgatgttctggcgcaattattgtgaagttctcactctcagaagtgtcactgtttggatgataggttttgcttgtgcaggcagtgttttaaataggaatctcttgtcataaagacagtgaggaaacctgtgtgtccatttcagccagtaagagtctctagtgctttgaagcagctctgtaaccctcagggaatcttaggagtcattaaaaaactaagaacaatggaaacaaaatgcatatatgcttatgtaagtgtactctttcttcaataatggtactactaaggaccagaaatctatatcctgggagctttgaagattcccatattgtaagaacttcctattcatttattgcataaacataagcatcaactgtgtttccacattcaggaaattctgttttattcattgttacactgccagtacttagaacagtacctgacataaagtaggtacaaaataaatatttggtaaatgaaccaatagatgatttctggtccaggtttataatctagtagaggatacaatcacataaataatgacaatagtataggttggaaagtatactgatagaaaagaactggccaggcacagtggcccatgcctgtaatcccagcacttggggaggccgaggtgggtggatcacctgaggtcaggagctcgagacctgtctggccaacatggcgaaaccccgtctctactaaaaatacaaaaattagccgggtttggtggcacgtgccagtaatcccagctactcaagaggctgaggcgggagaatctcttgaacccaggaggtgaagattgcagtgatcgtgccactgcacttcagcctgggtgacagagagagactccatctccccaccaaaaaaaacaaaagaaccaaggtatcctgagagcactgaggggttctgatttttactctttcccattttagtttcctactgaattactagaaaattcatttgatgatttaaaacaaaaacaaaaactttcacttacccactatcactgatcctttctccttatctctgaagcctagaacagaaatttaaagaaaggaaaaaccaaagaaaggttgatagaacaatccaggaacagataaattcctgacttaaccaccatttttgtcagtatctggttagccttgcttattcattcagccaaacctttagcactactatgtatatgacattgtactaacctctgggatgaatacaaagatgcattgttcatttatttaatttttttaaaaatgtaatatgtgagaccctatcctaaattactttattcatatctccaatttatagatgaagaaactatagctcagagaggtaaataacttgtccaacgtcacttagaaataacagagctgtgatttgaacccatattgtatagtccaatgggccaggagtgctctcaacccaccatgctctgctgcctcttaatgctttccctgaaggaagatactacaatcaatggggcagagatgagctgtaaagggataactaacatgtggtagaatgtgccaaaagaatatagtgaggtagtgtgggactttaaaaggagagattacttcaggcagaaaaaaacgataaggaaactgtgtggagaaaagacatttcagttgagcattgatggatgagaaggatttggacaggtagcattgaagaggatagatattccagatggtgagagtaagtatcaggagcataattagggaatggtaaatcatctagttggccagagtttgatatgcagaaataatgagaaattaagctaggtggggccaagtcatgggggattttgaatgttgaactaaggaaattggtctttattcagttgacattgggccccaatgaaagatttttatgatgaagaataacagaatcagaaatgtactttaaaatcttaacaaggagtttgtatttgataatgaaaaggttctggaaatggatagtgctgatggttgcacaacattgtgaatgtgcttaataccactgaattgcacactgaagcgtgattaaatgataaattttgtgtgtattttaccacaatttttaaaaaacaccataacaaggacctgactgttggagctgagaggcagtgactgtcgtgaaagaagaacagaatgatgcttggcattttcccagatggtttttcatgatgctcaatgtttgttttatgccctttctaactttaccctcagcaaagatgtaccagcaggtaatacaaaatatggttgttgccattacctttaaggagttcatggtttaatagagatgatagacagttttcaaataattatagtaccagaataatcaattttacaatagagacattaaccaaattgtcttatggataaaaaaaaaaaacctgccctggactccttctctactcccctaccccaccccccaaaaaagagctgggaagacttacctgcaacttaataattttcatagaataaaacatgttcagtagtccttcctgtatcaattcgtgtaagaacagttacatattagtaggataagtatattttcaatatctctagtaacactttcatttttccacaaaattttaatccatgtctaattcctgttcatgggtccgtgtaaccctttttgcatagcttttctaattaaataacaatatgaaacagtgctaatagatggcacaactaagtgcataatagaatattcattctgtaagaattagaaagtgggtactgtgaacaaatgtattaggcactatgttgtatcatctatctagacagaggagggagatccttttaaatggaccactattttatttcatctcttttcaactcccgtaaaaagtactcagaaacagactctttgatatacttttcctaaattcttcttgtagatttttgttctctgtttattttgaatcttctctgttcttcagaactgtttcttttagtaactttgtcttttagaatctccaaccacaaatgagctacactggtgatgggtaacactgagtaggtaaggactagcatctgtagattgatgtgtttagagacttgccctccattcaaaatgctgttgcggttgcttgtaacactggtagcagtctgctctcaggttttaatgacatcatttgtgcagctttacagtagatcatactggagtaaatgctctcaaattctattgagcagaaggacatttgacaccaaattgtctagatatggaagtaagtttttcagacgtgttaaggaaaggttacttgggtctaatttgaaagctcattgtcttttggagaaaatgttaatattcattgtattggcagtaagaaggacgatgaagtttacatgactgatatgttcatcccttaccttctgaatgcattaagagatcatcgaagaatttgccctttctcttcatgaatgaagaaattgatacagtaaaatgttcctaatctatatagaggctcctctttcaaatttggttttttatactccaaaaaacagtgactattccagtcactttggcttctgttcctcagctcttaatctctgggtttatgtacatatgcatttgctttggagggttatgacggtggaagattaatcaccagtctctgccatctatgtttgacagacacagagcttgccttgccttctccagagcactttgtaaaggagagagctgaagtttaaaataacatcattttctctagaatgctcttcttgttttattacatacatggttatagccttagtgaaaaatactcatctgacagaccttatggactgtaacaatatgtagaatgacagctttcccgcttttttcttttttttctggtgattggattgatttttttttagtcagttttaaattacaactgaggtagttttaatttttgacattctatacaacaaatttgttactttacaaagaaaaagaatctgcctttgcctgggaaagagattgtcgtattcaaacgttttaacaacatgaccttttattccattgatttctatagagaagcacaggcatgcttcagaaaaggtcagtgattctaattgaagcacaccgatttttttctagttgcaaaggctcccatgctttttgttgcaaagaagatgatgagatttacggctgaccatttgttacaagagaacacaatgctctctgtgacacattgctgtttttctttcatgtggaaagcattgtttgaaatcaaccatatctgtaaaccagattgtcattatccacgctattcaatgccctcacttttatttcagatcagccagtttcatatctgagtactaggctgaaacttccttcccctgtgcacctgattttggaagaaaaaaaaaacgagcaggagattttattaagtctcacacatttatggctgtagattcttttttcagacaggaatggcaggatttcagaatttgtgcttaaggtgcctaagcatgttagtgtttaaagtgcttaactgtgttattgcttaagcatgttttaactgtcattcatatacttgtcataagagaatctgtggcttgagggggccaggcttgggcatctatgtactacagtttattaaaccaaatttactatgtcttttggaaaagtcacctgactcatatttgttccaatatatgtcacattgaagatgaaaacttttttttttttttttttgagacagattctcactctgtcacccagggagaagtacaatggcatgatcttggctcactgcaacctccacctcctgggttccagcaattctcctgcctcaacctcctgagtaactgggactacaggcacatgccagcacaccaggctaatttttgtatttttaatagatacaggatttcaccatgttggccaggatggtctcgctctcctgacctcatgatccgcccgcctcggcctcccaaagtgctggaattacagccatgagccaccatgcccagccaaagatgaaaacttttaaaaaaggattgtagaacctttgaccaatatgggacctacttgataaatatttaatattgtaagatttctttttttgtaatctggcttagcattagtttctgtccatattaaatgaaaaaagaatgattaagtttccattatctgaaatagtaaagagagtttaggaattaaaatagggttttcaaagctttctgtccatattcattctgtaggaaataatttgatacaacatgttgccattttgttttcccaactcagataaaccaattaaatatctttattttgctatctgaaagtttttaacgcatcattagaacgtcatacagcatcagtagctcattgcacttggaatattaaatatgttctcagacttcagttgagcagggaagccagcccactatctttctgaactctagatggcaaaagcttttgacctgatagttttttacataagacagtatcacaacttttcacacatacgcacaacttgaactgtccacaatggttagctgtctgttattaaaagcgtttattcagcagtgccttattatgacatatttatacaacaccttgtcatcggtaagcatttatttgtaatactttgtaaattctcccagttcttattgactctctaaatgctatgtaatgaatcaactttatttttcttctttttttctgaagggtgtgaaaaatgtaagtcatagactatgttggcaggcctgaacatgggaagatagaaaattgaccgccatctacatacgacataattttctgcttcagcctgagatcccaagaaccactccccttcctatgccatgtagtaaaactcacatcacctcttttagttcatttaaaaggccttcctgtctgcataaagatgatttagtgtgtagcaaatcctgagattgttttaaagcactgtttaaagttcaaactcaacagctggattttttttccctctgctttgaagagagtcactatagttggaacaacttattcacgctagctctttgaaacacctgtgttccaggtgaagccaaaaaaaaaaaaaaaaaaactaaagcttgaatctagtcttttcacctctccattaaaaaataaatatatctctaaaacttcccagctggtgggaatgaaatgctgtcagtgctcccaactgttagagggtaatattgaataataacaaagccacacttaatttgagcttctgaaaagcctcataacctcattatcattctcctgaactgcttaaccttctggttaaccttctgattattaacctcttgacatacttaattcaggtgtgagagtttagcgaagctcatgggactgtatttatttgatcttttttgtcatgtcccactgtgttgactttattttttaagattgctagacaccaggaggcatgtgttaggtggagacctagaggtttcagaagccactaaatatatcagacttgccataattggaggatatggtgaatcagtggggcttttaggcacttcatagaccagctgagtctcctgctatcaacccaatttatttgagagcagtacctcaggaaacttaatagacctgtagcacactagcacaaatctggattttagccagagtacagtttatttatgtgctgcttgtattattttgctctctgcatattctatgcctgtcattattaagtattaatcaaaaatattgaattgtatctttggcagtgggtttaaaaattacacgtttaattgatagtttacatcacttagaggtggcaagagaaccagatggtagaaaataggatcaggttgaagtggcattttttttaccaaagaaaatatgatttgcatgagtaagcaaagttttggggtttttaatgtgtgcttttgttttggggggatatggggactattaatcagttatagaatattaatccttttctgtaattagggttaaatatgaagaatactaatctgataggtaatatttatcactctgagctcaagactaagaaacgcttcaggttattaaccctttaccaaaaccaggagttaccttctgtagaggttctcagaggtctcacagaaactagtacttttaattgttccctcaagttcccatctgtcaaaaatatgtcctgtagaaaacctttcttggtgtaagtcaagggctttttgtcctttgagtgaatgagtaaactctaaaggaatgtgactgtcacggacatgtttctttgatgccaaaaaccctgcatgagaccacattaataaaaagtgaataaagtttttctccttcttcattgatgatatccttttgagatggcctagtctttccttttgagatcacagtggcttaaaggagcattttttttttttaaagacagtctcactctgtcacccaggctggagtgcagtggcatgatctcagctcactgcagcctccacctccagggttcaagggattctcctgcctcagcctcctgagtaactgggattacaggtgcccgcaaccacacctggctaatttttatattttttagtagagacagtgtttcactgtgttggccaggctggtcttgactcccgatctcaggtgatccacccacctcagcctcccaaagtgctgggattacaggcatgagccaccgcacccagccaaaaggagcttttttgagtggttgccagtttctttgttccttatattcttttgcttttttccctggggagaatgttggaaagaaataggggcacattcatacattttgaaaaaggccatggactttgatatcaggcagctctgagttcaaatcctgattttttttcctccacttactagctttttgaccttcaaaaagttacttgatactcttccctaagcctcagtttcctcaatgataatggagatgatattcttactcacagttattttaaaggaataaatgaattaatgtacgttgaacatttggcataccacctagcatgtattgatgttttaaaaaaaactcatttcccctcctccctcatataacgatgttgatgatgatgatgatgatgatgacgatgatgatgatgatgatagcagctaccacctaaatcgttttctgtgtgccaggcatttatatgtgattctaaatcctagcagtaactctgtgtagtaggtgttcctgtacctgttttataaatgcaggaacagactcagagaagttatttaacttgcctaatgttatcaagctactaagtggcagagtcaagattctaaccttggtcattttgattccaaagcctacaacaaacacaccgcctcccactgctgaacctgttaactccttattttaaaaatcaatttccaggccttctccctcctgaagtagaattgttttgttcttacctctttttttagttttctatttttgaagtttactttatcttttgaaggacagagtacaagaacgagggctgtgatctagtgccacgtccgctgcacactaagacctttgactaatttctttacctctctaaacctctttgctctgtataatgggaacccataatgggacttacttcttacagtaattaggagtaggtgaggcaaaataaatttaaagctggatgcctaacacatagaaaattgcagtaaatttcagctgttttcagtcaggcttctttgttcatttacattaaaatctttttgcaccttcttgccctctctccttgatttttacatgtcaatgtcagtctttttccaacctcttggctgttgccttgcattcatccatcttttttctcagtcttgtcattgagttaacatgttctctacacccacttagtacccagtcagtgtttattgatgctaatgatgatggttaaacaaagatgctgttggcaccagtcctgaaggctctgagactccctgagtaatcatgacttcctaaaaacagaaaagtactcaatcatcttatttataattgaaggtcagaatttgatgtcagcatttgtttctgtggtgactgtgtagctttttctgaggaattacctttgacagttggggtagtcagtatttctggtgtgaggctgattattatgcattcttaaattacttcctaaaatagatgcagcatcgtataggtgggttaaacaaatattgatcatggtacagatctgctttaattggagcaagaggtcaggagaggcttatcattgaggtgtagatggctgccaggctctagattagttacctggtcttcttgcccataatcttttttgcgtcagagaaaattgtacaggcctatttttaattctaagcaaccctctctgttctctccctttttgatatctctaatatgttcccacctaatgtccttgatcttcagaagatgtctcatttcttgctttttcttgcctcaaattctgtcctccatgataacgttttcttcctcagcaaattttgtgggaatctagcaggatgtgctgcttgttatatttgggcactgtccactaacaattcagctgctgacactggttgcattattctaaagaatgtcatgttgttaaggttgaatttaaaacccattaatggtgagaagcttccataattttaatatccaggttttttaataaaagaaggaaagaaatggaaaaataaattttaaagataaacttttatgcaaatgaaaagcagattgtaaccaaatgcaaataaatacctcagtgtggcatatttcatttagtagaaagtagaaattgttaatttttactgtatctaatgattcccaaacttatatttttaactttgatctcccatcaaaggcctgtcctgtatttccagcaatctctcatttagactttaaaaagaaatctgtaaagggctactagtccaagccctgtaccctgcccccacccccccacaaaaagtagccaggagttcctttttttatatacacatgcacataaacatttatacacatttatacatacgtatgcactaactttttagttctcatgcacttaaaaaatatgaggggatatgaatctatttaagcatatatgattcataagtgcagggaaaatgtttcttgtatcgtcaagattatttttataatttgactaaagaagggtaagaggtaaaatacttgaaggaagtgaatactcaggaggttagaaagagacactgagacaaagagaatgaggtagcaaaatttgcctcttgatttttttaacctttttatttttcagtcattggccaaaagggtatcattatttgtcagacatttcttcactagcagtttagacttgttacgtggaaatagccacaagttgttatgaggattaaatgaggtgacctatgttaaaagtggcacatggtaagctcaaaaatacttttcagcaaacagataaatcctctgcaaatgtgggattatttcttattttggttgtgttctgccagtaacagaactaagactaaaattcaggtgctggaagaaatgaataaaagtacttgggtggattgagcagttacttcaggtgtctttggattcaatttcttctgaaaggaaagactaaacctcaaaaagagaaaaattagttatttagcataacctgctacttgtgttgtggggattcatgaaatagttcatatgaagtacttaaagaagtgtctggcacatagtgagcactcaataaatgtccattttatttttattacttttcatgttgttgttaaaaaacgtttttttgagacagggtcttgctctgtcgccaacgctggagtgcagtggcaatcagagctcactgcagcctcgaactcctgggcttaaacttaaaatcctttcactttaggcacaagtagctgggaatacaggtgcgcaccaccacacccagctaatttttaaatttttttgtagagacgggatctctttatgttgcccaggctggtcttgaacttctggccgtaagcaatcttcctgcctcggcctcccaaagtgccgggtttataggtgtgagccactgtatctggcttaaagaaatttgttaaggatgaaccattttaggaaaccaaatatgagtgtatgtgtttttcatacagtatagataaattgccaattagtttgcacatctaattcagaaatttgtaggtgctgaagaaagcttttttgttgatggtttctcacttgttgaaatctctttagttattggaaattagtaattctaatttagagatttatctctttagaagaatatatctttgttgtgcaactttgttgctcttattcctggtggctctatgatggcaagtctggcttattcaattgaaaatcagaacctaaggagctttatgagatgaatagccataacagtgttgtaatctttgagtgaattgcagttgcttgtttaattgtctgtctcccttgttaggctgttgagtttctcagtgaaagcagtgggctgtcttgtacaccactgcatttctagtacctagattggcatcttgtacatgctgctattcaaaatttgttgaagattgaagacagtgacttctcatttggaaaaaacatggcaagggaaggaatactacattatgtaatacaatactgattttctgattttgcttgaagcctggtttttgcagcattcgagtaatggcagtctcatgtatttcattttctcttttaatagtaaacaaattgaggtaatagaacttcatggaaagggtcagacttcagaatcattacaatctagatttaaatgcaaactctgtgtggagcagcgtaacctctcccagcctcagtgtgcttatttcttaaatagaaatacagcagctataaagtaggtgttatgaggattaaatgagatcatatatgaagtggcacatagtagcttcaagtaaacattaatatcctttctccttttcttctcctcatagcccataattaagaataattcaactattttttgtttcatagaaacctgcttatggtggtgatatttggttaagaaattggattagcagacctataaaggcaagtttccacgggaaacagcttggtgggagtggagagagcactagactaggagtcaggaaacctgagctagtcttggctttttactgactgggaatgtgaccttaggtaaagaatataacttctctagcccaagtttgtgtttaagtgatgttctccagtgactaacatgagaaagcagtaaaaaagcttgtaatattgtttttaaaaattaactctttaaaacaatacagagacattgttacttctcttgggcacctgagacatcagagctacctccttcccccgcccccactaaaacacttgcatcattcaggtttttttgaagcaaatcagtacatttgaaatccatatttcatggagctacttaactaattgctgcaatcagcagcaatttgttttatagtagggctgttcaaatcactttgaggttggcataccatgcacagtgtgtttttaacaatcatatttttaatggcacgtttaaataggagagatggttaatctgctcatattcttctgaaaaccttaactttggtcctatagtttatcttcatccaatggtaacttaaagggccatagcaaattcattgacccagtgggtacaccagctgttggagtggctgtcccatttagaaagaccaggagagggaaggagcaccctgttttcactcttgtttggagaccctcattaaatttctcagaaacaataatcagatagatgctgttcaagttaatggcacctctgagtccctgtcaagagagctttatttaatgtgcaacagacctggagtgatgcaggtgtcttttcaggccctcatttaatttaagctgctttagttggcatggcaactagttgagacatctgggagacattatgctggggattgagacttcagaggatttctgctagagcaaagcaaaaaccgtatcataaggtggtgtgtattgcttctgaatttttgaagctgtattgttagagcttcaaattcaggaattattttccaaagaaaattttaaaatgttggcctggttgtctcattgttttctataaagaaaaaaactgcattattcatggagtgaaaaatgtttttcccctaagaatttactttgctaaactaaaggttgacaaaacgtattctctgcaaagtggctgttttaatcactttataaaaatcctatatttaaaattttccagtcttttatgtttaaaagatactaaagaaagggaaagcatttctgcacaagggtaaatggaaaatggtagaggtagataggagctctgtgtgttttgccctgaactttccagttaattaaagttaattaacctgtccctattttttaacccaacctgtcatcttctcaagaagcagagatataaaagtagcattattttaaactctcctttcttaaacattataatagataatagaaggttgaatgaaaggtttttgaagttcatggatcctgaagatagtgacataagtgatgtagtcatttgtgcttaggagagggaatgcctgctagtttatattttgtgagaaattatgtacgtgtgtatgtggtcttagtatgaaggaattgacttaccatttgaaatcatgctttatattcattttgaataccttttcagttttttgatatctggtaatactttgctctgtgttagttgaattatatgaaagtgttactgttgatcaaaaatagttcagtttgtccattcaaatcccacaggtatagggtgagcaacaccctgacctgataggtttcataatgctagatgaaatgtcagatttctttttctgaaacgagtacttagttataaaatatctgcttagaacagtactccctccagtcacttttccattttctcctttctttgaaaatgtagtcactgttagaataaagcatatgacattatttcatacttactctgtttttggcttttgtatcagtttgtttcgtttataaatttataagtcaaagcaagattttccaagtgccagcactatgatttcaacctgataaacttgaaaattaagatgttttctctccgctgcttacgagctaccaactgtcactactaacagtaaggattctggcatcacaacttggctgccaattttgtagatatgtgaagcagaatagaatataacctgttcttcgcatccatgcaagaactcttcaatcctggcaaaagcaaaaaaaaagtcagtaaactcagcagatctggctgacatcccatacacataaatgctttatacttttttttttttgagatggggactcaactctgtcacccaggtgggagtgcggtggtgcaatcatggctcaccacagcctcgacctcctgggctcaagtgatccttccacctcagcctccctagtagccgggactacaggtgcaggccaccatgcccagctaactttatttttttttgtagagacagggtgtcattaagatgcccaggcaggtcttgaactgctgagctcaagtgatcctcctgccttgatctcccaaaatgttgggattacaggcatgagccaccatgcctggccattggtacgtcaggatttttttattttttattttttatttttttttcctgtataaaagctcaagtttcggccaggcacagtggctcatgcctgtaatcccagcactttgggaggccaaggcgggcagatcacctgaggtcgggagttcaataccagcctgaccaacatggagaaaccctatctctactaaaaatagaaagattagccaggcgtggtagcacatgcctgtaatcccagctactcaagaggccgaggcaggagaatagcttgaacctgagaggtggaggttgtggtgagccgagatcatgccattgcactccaggctgtgcaacaagagcgaaattccccctcaaaaaaaaaaaaaaagctcaagttgacaactgtcttagtccattcattctgctataacaaaataccataaactgggtggtttataaacaacactaatttacttctgacagttctgcaggctgggaagtccaaaatcaagacttggtgtctgccgagggcccatttcctagttgacattctttaactataacctaacattgtggaaagaactaacaaactccattaggtctcttttatagagaggctctgacctcatgacctaatcacctcccaaaggtcccacctcttaatcacatctatttgggggttagcatttcaacctatgaactttggggaagacacagatgttcagaacataacaaaacgcttaatgcagggatggcaattgtgaaatttttatttttgttttgttgtttgggttttttctgtgtaatggtcctttgtttcctctcccttgacaattctggaaccagtgcaactcaagaatattgggacttctgattaagacttaaaggtgcaagtagcaattttttatgtcaccatcctgtgatttcctagtggaaaagaaatttttggtacatactagcgggttaacatccttaatatgagaaacagtattacaaaaaaattgtcaccctagtagaaaattgagcaaaggacaggaacaatttgctgtcagtcttggttttcctttttttttctgtctctcatggtcacacatatgtgtggccaataaacatgtaaagagttttcaaccttaaaacacagtggatagaacataaatctttactaccattccttcctgtagtccccttaaatttcactaaagggttaaaaattcagtctagaaaaggcagaaatctaagctggcagtaatgagaacccagaaacaggttgattcttgctacagaatgtcagaaagtctcaggaattggaggcatcaagtatctcagaaagtggggatacatgtgggcctaaacatcggattggttgcaagcctgtttaagaagtagtacgatgctcagatcttcttccctcaccctgctggagactaaaagtttattccctggacacccactaacatagaattctggcagcctgacctattcatcctaagaagaaagattggaggactcttctgaataaatgattaacccaggaaggaggatctgtacataattgagggttcctcatgaaataataccttaaagctctaagcactcccacagagctacattatagtgaaacaataatattgtaaacatccagtggcaggagatgacttaactcctgacatattatgtaaaatggagtactatttaagcatttgaaatgatataaaagaatatatataataccatggaaagagtttacagtattttaaaacttttttaaagtatatgtaatatcctcacatacacataaaattctatatataggatgtttatctcaaggttatttaaaatagttaaaaataggccagtctcagtggctcacacctgtaatcccatcactttgagatactgaggtgggcagatcacttgaggtcaggagttcaagaccagcctggccaacatggcgaaaccccatctactaacaatacaaaaattagtcgggcatggtagcatgtgcctgtaagcctagttactcaggaggctgaggcatgaggatcgcttgaacctgggaaatggaggttgcagaattatgagccaagatcacagcacagcactccagcctgggtgacagagcaagactccatctcaaaaaataaaatagtaaaaaataaaattagaaatagctttttaacaatgatcacttggttaaatgaattataatatagccacacgttagaacactatgcagtcattaaaattctgcattattaaaccattgaatgggataagcaagggattcccttgcttgttttgtttttagaaccttatattttattaaaagaacaggcaacagcagaaaagttaaaaggtcattaaaaagtcaggaaacaacaaatgctgtagaggatgtggagaaataggaacgcttttacactgctggtgggagtataaattagttcaaccattgtggaagacagtgtggcgattcctcaaggatctagaactagaaataccatttgacccagcgatcccattactggttatatacccaaaggattataaatcatgcagctataaagacatatgcacacgtatgtttattgtggccctattcacaatagcaaaagacttggaaccaacccaatgtccatcagtgatagactggattaagaaaatgtggcacatatacaccatggaatactatgcagccataaaaaaggatgagttcatgtcctttgcagggccatggatgaagctggaaaccatcattctcagcaaactatcacaagggcagaaaaccaaacaccgcatgttctcactcataggtgggaattgaacaatgagaacacttgaacatagggcagggaacatcacacatcagggcctgtcggggggtggagggctgggggtgggatagcattagaagaaatacctaatgtgaatgatgatttgatgggcgcagcaaaccaacatggctcatgtatacctatgtaacctgcatgttgtgcacatgtaccctagaacttaaagtattaaaagaacaatgtatataataccagttttattttaaatatacatgtatgtacccatgcacattagtttcatcaaaatgttctaaattcacccaaagaggtagaattctggatatttttaatattcttgcatttttttataatttccattttctacaatgaagtttaagaaaactattaaggaaattttcaaaatatacaaaaatatatacaaaatatgcaaaaatatatacaaaaatataagagccagtagtatataagtatataacttgcgtacctcatgctcagctttaacaatattaatcattttgccaatctcatttcctctattcttttttattgaggggaagggaaaggagggctggagtattttaaagtagataaccaaacatcacattattccacctataaatacttaaatgtgaatttctaacagataagtaccttgaaaacaacaattatgccattatcacacctaataaaattagctaattccttaatatctgttgtctgattgcctcaagagtcactttttgaataaggttctaaacaaagttcacacgtatgtatggttattatgtctcttgagtctcttatcccaaacatttctgcctgcccttcaccccgcaacacacactttttttgtgggagggggagggggatggtcattgatttgttagataaatttttcctgaagaatgatccacgttgtgtgtttagtagattgcttcttcataatgtcttgttttttaattccacatatttctagttaactggtcattagagctagatgattgattacattcaaattaagttttttgggacatgaataattctaggcagtggtgtgcatatcacaaacataatattcttgttccacattaaattatgctaagattgagtggtggattgaagtgatgtcagtctcacactcatccttttcaagtggttttaccagccatcgatggtgcctagctccagagattgcaaaaccgtggttttttttctaattctgtaattgtttctgcatttattggttgaaattattctataaagaacatagtgaacatttagtctattttgtgatagttgtggggggttttgtttgtttttgagacagggtctcactctgtcacccaggctggagtgcagtggcaagatcagggctcactgcaacccctgcctcccaggctcaagtgatcctcccacctcagcctcctgagtagctgggactaccagcaaatgccacaatgctcacctatttcttaaaaaaaaaatttttttttttaagacaaagtcttgctctgtcacccaggctggagtgcagtggtgcgatctcagctcactgcaacctctgcctcctgtgttaaagttgttctcctgcctcagcctccaagtaactgggactataggcacatgccaccacacccagctaatttttgtatttttagtagagatggggtttcaccatgttggccaggctcgtctcaaacttctgacctcaagtgatccacctgcctctgcctcccaaagtgttgggattacagatgtgagccaccgcacccggcctatttcttaaactttttatagagatgggatttctccatgttgcccaggctggtctcaaactcctgggctcaagcagtccaccctcctgggcctcccaaagtgctggggttacaggcatgagccaccacacctggcctactttattagtttttaaaaatgttacttaaaaaaaagaataagaagataaatccaaaattgcatagaaccattgaagcaattttagacatgatcagatctaaaatcttcactactatgtaaccgtaggtaggttgtcttctgttaacgtcaatttctttatctaaatttagggtaccactacataccttgtagagttaccatgaaaattagatgagattatctatttaaaatacttagtagagtacctatacctagcaggtgctcaatatacattcattcatcaaatatttatagggacctactatgtgcactatattctaagagtttaggataaatttgtgaacaaagcagacaacccttgcctttatggtgcaggcttggcaatacagacagagaataaacataaggaaattacaggataataactactaagggaagaagaaaaagtaaagctgtgcaaggtgatagcaaatggatagggagtacaggttgttacacaaacctagatggtatagcctattacacacctaagctgtatggtataacctattcctcttaggctacaaacctgtacaactgtacaacatgttaccgtactgaatactgtaggcagctttaatacaataataagtatttgtatatctaaacgtatctgaacatagaaaaggtacagtaaaaatatgatataaaagataaaaatggtacacctgtatagggcacttaacacgaatggagcttgcaagactggaagttgctctgggtgtgtcagtgagtggtgagtgaatttgaaagcctagaacattactgtgcattactatagactttataaactctgtgctcttaagctacactgtttatttttttaaagtttctttaatataaattaaccctagcttactgtaatttttttactttcgaaactttttaattttgttaaatattttactcttttgtaataacacttagcgtaaaacacaaggacattgtacagctgtacaaaaatttttttttcttatttatttattttttctcactctgttgcctaggctggattgcagtggtgcaatcatggctcactgcaaccttgacctcccagggtcaagtaatccttccacctcagtgtcctcaataactgctaggactacaggcacaagccaccacacctggctaagttttttgtagagttgaggtctgagttgcttttttactttttaaaataagacacaaacatatacattagcctaagcctacacaggtttagtcaccaagacacccctaggcaatacaataggaattttcagcactgttacagtctgtgggaccacctttatacatgtggtccatcatcaacgaaacatcattatataatgtctgactgtagtgtcagagtggttgaggtaggcctcatttgaaagataaaatttgagcaaaaccacaaaggacgtgaaagagttaaccaaatagatgtcaggaagtacagtccatgcagagggaatagctaaggcctaaggttggagtgtatctagcatgttcagagaatatccaggaagaaagcaatagaagaggtcagagaaggaagaaggccaaatgatttatggcctgtgagaccattttaaggactggcttttactcttaaatgaaatggaaagcttttgcagaaaagtgacataatttggccttcatcctaaaagatcattctgtgaaatgcatccagttttggatgaattgatggatggaaagagcaatggatagatgtgtgacaaagcaaatatagcaaaatattcagtgtagattctaggtggtaagtgtgtatatgggtcatctctgcgtaattttctgtgtttgaaaaataagaaaaagttgaataaaaactattaaaaactataaccctgatgtcattatttaactcttcatcattttatagaataattttaacatgtcactgaaaactgtcctgtaagtgaatcccacatgccaaatatcattttctcattaactttcattatgaagtagaatatatttctttggaaagaatctgagtgataaaacctaagattaaaatatctaagaatgtaaaaggcttaaaaattatattttctatataataaagtaaatgtcagtatataggcaaaataaaaaatataacagtaaaaaaaattatcctggctgctgttttagaaatctagcagtcttgggccagagtagtaacagtggatataagaagtggccttaattctgactaaattttgaaggatttctgatgaattggaggtatggtgaaagagaaacggggagtaaaggataactccttgatgtggtttgtggtgcaagcaactaagaaagatttggacagttttggacttgttagtttgaaatgtcaattaggtatccaggggaaataggtaggcagtttgatataccagtctgcacttaaggaaagattaactagagagagaaatttggcagtctgcagcatggatgttatttaaaggcatggcactggatccgagtatccacgagtgtggatagggaagaggagtgaggaccagcagccatggggcatttcaacgtacaatgattgaaggagactaaagcgatttggaaaaaatgtctcgaggaggagggagtttgaaaacaattgaaaaacaatttttagttgttttgtcaaaggctgttattatcagttctcctccctgttcccaagttatcccctttcctacttgtttttgctaaaacattaaattagaaattgccttaagaaaacttaatacttaaattataagatttaccatacttttgcttccctaatgtatctaacacgtgcttcacaagagtcttgaattgcatatctccatggctccccaggctccagcctttaatcatcggccatgtgtccattcagcaaaaccctaaacatacaacagagtacaacgtataggaagctcgctcgaaatctagtggtgatggtggggaggggtgtttcataaatatatacaaagttaaataataaaggaactaaattactaagattgtggagagacttaactaattattttacatgtgtttaggaataccatattttataatgtaacaagccacagcccttggataggttgtgatcttttccattggtgtcatggtggcctaagatgagatcaccaatccccatttgtttggattcaaaggacattcctgtaatatgtctaagtagagcttaagactgtttggtcgtcatacttttcctggcctggctgttatttaaaatgtttacctttggttttctctttgataatgctgattataaggaaatcatttggtcgtttacttctgctgacttttaaacatgtaagttcttttgattttagtagtgttttgtgagggctggaattctcacctctgtcacgctgtctagaagctttctttccccacttttccagccttgagaatggaagttattttttagatctggtcaccactttgagggggtaggggactgaattcgccgaactctccttaacttaaaacttcaagatatgttgtcacagaattgatgcagagtgacctacataaaattatcgtctctcctcaaccactcagctcagatcatgtcaaagtttttctttatcagattttgcgaggtaagatttctttatgaagaaaaaggtgctgtcacactgtaaatgaaatgttttgcttctcatttagactttaatccgatcttccaaggttttcttcttctctaaagacttttttcttttgaccaaagcatattttataatttctatatttaatgttaaagaggaagctttttagggttgccaaatagttcttgttttcagtgatgaaagagaaagccctgtcaaattcattaggcagttgagtgggctaatctaggtgaataagcaggatggtttgtcacaagttcacaaaacagcctttagttttcaacggaataggaatatgtggcatcagacgactaaagtgaaaagtgactatatcccctatggatgacgtccatcctgcaagccaacagtaggtgggcctgtctgagtattggctggcatacctgaagccaactccagagaaacaaaatgacccttaaaaccaaagtagattgggaagaccaataaacagagccagctaaattctagacagctcattaaagagcacagacttgactgagaaaggatttgggccaacattattgacacttcttctggccatcaagtatgtccatgagaattttgccattacaagtagagaattgcttaaacctgaaacagctttcttacctagtaagcaaaatactttccccctgccccagaattcatagaattaagagattctttatagagattgaaaaataaatgccaaaaggatgaaaacacataagcaatttttttttcagacagagtcttgctctgtcgcctaggctagagtgcagtggtgcgatctcagctcactgcaagattcgcctcccaggttcacgccattctcctgcctcagcctcccaagtagctgggactacaggtgcccgccaccacgcccagctaattttttgtatttttagtagaggcagggtttcaccgtattagccaggatgatcttgatctcccgaccttgtgatcctcctgcctcggcctcccaaagtgctgggattacaggcgtgagccactgcgcccagccacataagcaatattaaaactaaaaaactcacctccaggccaggcatggtgattcatgcctgtaatcccagcgctttgggatgctgaggcgggcagatcatctgaggtcaggaattcaagaccagcctggccaacatggcaaaactccatctctactttaaaaaaatacaaaacttagctgggcatggtggcactcgcctgtagtctcagctacttgggaggctgaggcaggagaatcgagtgaacccaggaggtggaggctgcagggagccaagatcgcgtcactgcactccatcctgggcaacagagtgagactccgtctcaaaaaaaacaaaaacgttcacctctaagatttgttcatattctatggtaggggaaaatggggaagatattggctctttttgtacttgtgaaaaatgtgatttgctacattttatccaaaaaagactcagcccattagccggatatggtggtacatgcccgtagttcccacttctcaggaggctgagatgggagcatggcttgagccaggaaggtcgaggcttcagtgagctgtgatcataccaccacactcctgcctaggttacagagcgagaccctgtctcaaaaaaaaaaaagaaaagaaaaaaagaaaaacgcacacaaaaaggactcaaccttgaggctgggacctttagcagtactgaatgaagacactggtcttctaagatttcacaaatatttttaaagtggttcattaccctcttgattctgagcggtaaagaatactactgacagtgtgggcaagttcctgaattttgttctatcagtgaaacatctgtcctgggaaaggctccctgtagtaatggaaactgttttgttggagcaggctccgagttgcaggttaagagtatcaatagcagcagtccaatagccacactgactagcaatctaaggttattagtatggtcttaactcgagtgcctaagaagcttatctgtatttaaacctacataattgtttaaattatagacattatctctagactttgcaaacctttggtgacattttattttactgtagcaaaattacggtattttgaggtgggactagcttttaataatgttcattatgcagttatttagggaacaattttaaatcctctactgttttcttccaaggttttttttaaattattggttgagtaaaaggaattaaatatctgcaattaaatctgtttgttatttcaggtttgaaatatctccattcagctggcattttacatcgagacattaagccagggaatctccttgtgaacagcaactgtgttctaaaggtagcttttcagtttatttaaatacctgggaaaaatcagaatgtcagggcaggtttaagaacaacatatttttgtgaaagaaagaagttcatttccattactttaccaaaagttaacccagttttctccatatcactactcatagccatggtaataatttgtagtcctgcctcatgttcttttcatgatatttggcctatgttttagaaacactgaaattggaattgtagtgtaactagaaagaagaatagacaaggtgactcctttacagcttgttccattattaaaagaagtgcatatcagaagaaatattagaacagcaagcatctgtttatataagagaatgaagtgtgacttttaggaagaccatttacatttttacacagctaacatatctatatgctgtttgaccaaggtagcaaagtaagaagtagaaacatatttaaaagggatagtgctggccagacacggtggctcatgcctgtaattccagcattttgggaggctgaggcgggcagattgcttgagcccaggagttcaagaccagcctgggcaatgcagcaaaaccccatctcaataaaaaattcaaaaattagctaggtgtggttgcacatgcctgtagttccagctactcagaaggctgagatgggaggatcacctgagcccagagcgtgaaggctgcagtgagctgtgatcacaccactgcacttccacctaggtgacagagtgagaccctgtctcaaaaaaaaaaaaaaaaaaagtgaaaatgccaaaccagaaaagggtaatatgcatctatccaatgtatttccataatgtatagtagccaattcttaattattcctctgaagaggaattgattacagaattatatttagtagttccaaaatttcaagtcatcagtttcagttttacttctcttccctagtacagccattgtctttcatttaaaaaggggcttgcaaatagcaaagtccacatatttgtatttccctacctctaatacagatgtgtattggcagaactcttgaatagagagaggtccactatatttttcctcataatagaaattggaaataagggcctttaactgctatatttgaaaagaaaaataaatttttaaaatgttacccactttaaaagtaatcaagactatcattattacttaggttgctggcggttaaactaagtaataaaaccaagtgtataaataaaattcattttttattttaaatgatttctctgaactgtaggtcagttctcttgaaaagctggtggattatactgcttatgaatgaaaattctcccttcattatagccttgaagaaccctcacccttattttaactcaagaaagatgaaaacctatttttcatattttccctaaaaatagctgatgttgtaattcagtcttttgtttccacagagaagttaattgccaccaaaatctactaaagtattccttctataggttattgagtttttcctgccaccttttcactttttaaagagaacttgcaacctatccccataatcgttttttaattaaaaaaaaaatttaaaccttatagttagaaatttttttgtcctattcatacctaatcaatcttacgacagtttaagccaatttcttcttattttggtttttgattggaagacttcacacaggattttgtgcaggacctgtcatgtttgatgccattaactgcttgaagttcattttccaaattgtccgttatggttttataaccttggactgtatgaatgggcaactaaaggaaaatgccatttgtgaatacacaacacacaaatcagaacaaacaaattttgctccactcctttgactcatcttatgggcctacttttaaaaagccagaatagagtctaggctatagacactagttctttcttctcaaacatacaaattcattgaagatcattataacaaaacattttttaaaaatcagtatccttccatatcgtgaatgtattttgtttcctattaagcacaagatggataattttgctggaatttttttagttatctgatcatgtaagcttcctattttggactcaggttgtcttccaaataagttgctaaaaatgacgaaatcatactgatgtttttaataagggatttgctttataacagaaggcctttttttgttggatgggtggttggttggtttttctcatataaatatgagaaaaaaattatgttctttccttttgttggtttggtttttaaaaatatcctcaagagtcatggccaagtaatagagtttttaaaatattatatgttattttggccgggcgcagtggctcacgcctgtaatcccagcactgggaggctgaggtgggcagatcacttgaggccaggaacttgagaccagcctggccaacatggcaaaaccctgtctctactaaaaatacaaaaattagccaggcgtggtggcgcatgccactagtcccagctgctcaggaggcagagacacgagaatcacttgaacctgagaggcagacgttgcagtgagccgacatcatgtcagtgcacttcagtctgggtgacagagtgagactgtctcaaaaaatatatatatatatatgttatttgaacatatttgatgaactcgggcttttgttgttatgttatatggtttatctgtatagtatggaaaattttcctgctttcttaagttgtaaagatggtggcttcatactgattcattcccacatacacatctgaattcatttgatgtaaccagacatagtagattcaaatcagaaagaggggattgccaaaaattgggggataaattttgttttctttagaacggggttttcagattttctttttaagctgccggaactctttttcaaataaaatcttatttggggacttcaatttagaaaacagatttaaaatcatattttatcacttgcaatattgtgacttgtaaagttaatcagtgagaacactggagcttagatggccattactatctgatctcatcctcagtgctcctagttgtgttttgattgcccaatatcaagaaaattttaattcctaaagataagtagtagttgctggtggtggcacggctgctgtttattaatagctcaccttgtaaccctcagcatacttttcagttgagcagaaatagcaagaaaagatttatttctaagtttgtatagaagttaacctgtctttattatttattgctgtatctccagattctaacatacagtctgtaatataacaagtactaacttaaatatttatggcatgaagaaatgaatgaaccccatagcattagtattctaccatatactgcattttaacatatttatacatttgagtatgaatttgtattttaaatagataggtacatgtgaagtttggatataatattcatggaatgcctaaagtcagaagtagattcaactggagtcagtttgaaacccattgctttaaagaaattcacatatatttcataaagacgacagacacagtctcagctaaggagaccttcaagatacacccctttatcttatgatatcttcctctctaaactagtcttgaaagtaattggttttgtgggggtttttaaattttttttaaagatagggtctcaatctcactctgtctcccaggctggagtgcagtggcacagtaatagctcactgtagcctcaaactcctgggctcaagcagtcctcccacctcagcctccagagtagccgggactacaggtgcacaccaccacgcccagctttttttttttttaattgtttgtagagttgagatcttgttatgttgtccagcctggtcttaaactcctgatctctcaagcagtcctctcaatccctgggattacgggcatgagccactgtgcctggccaacagttggtctctaaatcaaacctacaagtatgcatttggccaggtgcagtagctcacgcctgttatcccagcactttgggaggccaaggcaagcagattgcttgaacccaggagttcaagaccagcctgggcaacatggcaaaacctcatccctacaaaaaaaaaaaaaaacccacaaaaattagccaggtgtggtagcacatgcctgtagtcccagctactcaggagactgaggtgggaggagcctcagatcgatcacgccactgcactccagccagggagacagagtgagaccctgtctaaaaaaataaataaagtcgtttacgttcacctagttttttttgcttcgattatcaactgaaaacagacatgtttttattgataaagatgagaagaatatttttaagaaaatgatgtaagtttgagacttttttcctctcttaaccaaataaaaccagattgtatattgacataaatatactatacctatatcattaaaaatgttccagagtggccgggcgcagtggctcacacctgtaatcccagcactttgggaggccaaggcagatggatcacctgaggtcaggagtttgagaccagcctggccaatatggtgaaaccccttctctactaaataatacaaaaaaaaaaaaaaattagccaggcgtggtggtaggcacctgtagtcccagctattcgggaggctgaggcagaagaatcccttgaacccaggaagcagaggttgcagtgagctgagattgtgccactgcactccagcctgggtgacagagtgagactccatctcaaaaaaaaaaaaaaaagtttcaaagttcagtgccctatcaaaattttgatgttttgttttactctttcatttgtatttgcttgataatgttttgattgccttttctgtctagatttgtgattttggattggccagagtggaagaattagatgaatcccgtcatatgactcaggaagttgttactcagtattatcgggctccagaaatcctgatgggcagccgtcattacagcaatgctattgacatctggtctgtgggatgtatctttgcagaactactaggacgaagaatattgtttcaggcacagagtcccattcagcaggtatgatttcaatttaaggctttagttgcaattctattgcagatttgaaggaaaatccatcttgcacatgtgtcttgggcttattcattatactgtctaatttgcttttaggaaattcaggttcacttaaaattcagaaagttataaagttgaagattacaaagagattcattttgtaacttatgagcctttagagggagtattgagtttatttatgtatttatttattattattattattttttgagacggagttttgctcttgttgcccaggctggagtgcaatggtgccattttggctcactgcaacctccacctgccaggttcaagcgattctcctgcctcagcctcccaagtagctgggattacaggcacgctccaccacacctggctagtttttgtatttttagtagagacagggttttgctgtattggccaggctggtctcgaactcctgacctcaggtgatccacctgcctcagcctcccaaagtgctgggattacaggcatgagccactgcacccggccagttgactttattatatgcactgatgcatagctgtgagctctgctatgacaatttgcacaggtataatcttcagttgttagaaggcctctcttccttctaagtgaatggctctgacttgaaaatgtattggtgacttaatgtacttacactttgtgcttagaatataaatttttagtgtgttgatttcttgaaatctgaacatttaggaaaatttctaacctttattattggactaaaatatctaaatatggcagagaacatcaggagatgattaaaatataatttcctcagagaatcctttagaagccattcatgttacttgaattgtctttaaagctaattattcactaatacacatattgacataattactgggtattttgtattaatttgcttgcatgaaaataatgtagtaactatgagctcaggctgtgaaatcagattggtgggttcaaatcctagctgcaccacttatgttaaatcttgggtaagttacttaacctctgtgttcctttttttttgctgcttcttcttcttttttttttttttttttggcccctaaaactgttctgaggattgttgtacaatgaagtaggaaagctgaaaacggggcctggcacatagtaagcactctgtaaatgtttgcaattacgatggtggtagtgtgccaggactctagggatacagcagtaaataagacagcattgttcttaacctttgtgaaacttttacatgagacaaaaataaatatgcaaataaatatgattccaagtaatggaagttccataaagaaaaatgtagccaggttagggacagacaatggtggcagagcagagcaggcactaaaggattctctgaggatataacatttcacccacataaaataaggcagtaagatgctggagaaatgttccaagaagagggacaaccaccataacaaagcccctgaggcaggaacaagcatggcatgttggagggaaggtatgtgatggaagacgctgtaggaaatgaggtcagaaagtgagaaagaacctggccatggtgacatgataaagccttaagattttattctaagtgtgatagaaaacttaaatgaaggttttgaccaaaggaatactaagatttgattgatgacattttaaaagatcacactgactactgtgtctttgtaaataattaatgcacttgaccagacagaattatttcttttatgctttttctacaaagaatttttacctaatatgttagaaactatatctgcttttatcaacatttaaatttttctatgctatacgttttaactgtcttttttaaagtttacatcttaaaaattgattctggtgttaaaaaaattatgtacatataatacttaatctaatgttgggtacttttgacaatattcacttttcaatttcttcagaaagtaaagtttaacagacttaacctgtaagactatcatatctggacataagctgtcataaaatggatgtgactactaccttgcatacagaaaagcttaagtaaaaaataataaggaagtattcaaatcctatatatggaacaagaatcttgaattgctgctgcaaaaaatatgtgagggaaagtgtgaagcaactggactggagttcagatatccctttgctagagaaatacatagatcttcagtttggcagtctgacatagccactgcaggagaattcatgtctgtctaattgttggtgtgtgttggggtgagaaatgaagatctaaaataggaaaaggctctaacttctaatggaagtcattatttcctgttgtattttctctgtatctttgagatttaattaccctggtactagcagacatcataaaagtgtttctcatgtatggatctgacccattttagacaactttctgaatgtttcagtttgtttttataagctagtcatttccttctgcctttagtgtggttgttagagatccaaaagtatcacctacacacttttcccaaaaagctttgtatagagatctttatttctgtggaaagcaagcttctcaagtatctccattaacctgtagggtgttgatgctgatggctaccccatggtttagataagtgcagaaaatagtgctttatattcggcaagcccagaaccaggaaaagaagtgttctctaggtaagaatttcccatcctggaaggatccaaatgaaatgttattgctaattaggttatgaagttagaacaattgtgacactacagaaaattggtaagatagtttgctacccaaagacttgtttgcaagaagactgttttattggtctcttttattgtgtccagctagctaaatgtggtcttatgtggtgtcatatttttctaagtgtcacagttttctgccagcgtaagagatttctagcatgactagaatgtaaaggatgtgtactggcccaagcatggagagcttagctttcatttcaggtgtgaatattttcagtatttattaaatcacaggtgtctgatttgtggattagcaccttggtgagcctgaatccatttgaagcatcagaatccattcattaactgtttggaaagaatagtcattaggcatcaacagaagaggagttcaactttgcaaagatcttagatgctatggtatcaagaaaacaggacagacatgcagactcccaaattgctatagccttagaatgtcatgcttatcaaaacatattttctatatttctatcatataaataggaacttttaaataaataagtaggaacttttaaataataggataaataggaactaaataatagaataaataggaataggataaatagaaataggataaataggaatggaatatataggataatcctatatataataaataatatgttaaataggaataggatagataggaacttttaaataataaataggaataataacaggaatttatttaaattcctttacatgaggaatttatttaaattcctttacatgaggaatttatttaaattcctttacatgaggaatttatttaaattcctttacatgaggaatttatttaaattcctttacatgaggaatttatttattttaaattcctttacatgaggaatttatttattttaaattcctttacatgaggaatttatttattataaattcctagaaatcttttttaataggccagaaagtgaaagtaggggctcctgtcagttaatctagagcttgtcttaaggttttttcccccagatttggtccacttctctaaggctatgatttaagagtaatgaaaagttatttccatgagattactatctatctgtattttatttccttgtagttggatttgatcacggatctgttgggcacaccatcactggaagcaatgaggacagcttgtgaaggcgctaaggcacatatactcaggggtcctcataaacaggtgagaggaggggggaatctttttctggtaaccatctgtttgggcaagatttcccttccaatagagtaatctattaaggatttttaagcaaatgtattatctgtaggatttttttttttaacatcaaggtcctaagtaagaaaatgttcaatatttgtcaaactgaataaaatctcattcctaatgccgtaggagaaagtgcgtgtttgtgtagctcctttgctaatagatgacccttggctttgtgtctcctgatttattggtgtctatgggaaaaattactggagatggagctttgacctcaatgccataacctactacatgtatatcaagatgtcctttccaaatactgagccaaaatacctcgtatttcttattccagccaggactgtgaagctgttgctattgcactcttgccactaacacagaatcagatgtgaacgttgttagaaaagaagtatgaagatagattgccagatttgcactcatcagtattacttgcaactagccaagtcactgctgagaaagacaaaatggttttttatctccacctgttgatttagcaacagtttttacaagcacttccttatctcctttggacagaacagcttaatgatgtgaagagtgaataaggggaatacttttcctaggagcaacaaattaaaacagaacagataagacttgaacaggatgacccagcaacaaattttcctgagttttggtttcttttgaattggacgtttagattatctgattgatggtaccaaatgacagagtgaatttgacactcctcctctcaaactgtcagccagacatttgcaaagggaaggtggcaaagggaagacctcaccttccctttgcggttctctctttgtaattctagtgtgactccagagcttttgttgtcacaggcataaagggcaatgaggtaaagtgtgttctcttctaaaaccagcccaggctagtaaatagagatgtatgcttgtatgttaaatagccctctgatggttacatgtttctgttgcatttggtttagaactgtaaaataatatgaggccctaacaccttgagaagagcacagtaagtcttaacctagaggaaagttctatattatagaaggaactaacaagatctattatgttccatttattggccagcatcaggaacataaaactaatttactaatgcctcttggtaaatgtgtccttagaagtagcaaaataattgtcctctttcactgacttcattaattagtaaatcttgcctggttcaaggtaaacaataatgaagagtgaagaagatcagacacccttatgctacccttctgtctctagaggagttttaactgttgttaatggttgctagttaattaatcatctgtgtcaaagagttgctaaacagcagcctgaagaacaaggtttcctgaggagtttcctgtctgctgtctagatagaacggctggaaaatgtaacctactgcaccaaaagtcactgtgcactgctctgagcattcctggcaattgagtactttttctgtgaaaattttaaaaatctgttagttgtaaaaacctaagactttccatgaaataaaaaaagggtaaatatattattttgtaaagcaaaagaagaggaaaggaaaatccaaagttccactattatttaactagttaaataggttgagatgtctaaacaaatcatttcttatatattttgctattaattggcctcttaacagtaatccctttgcttatcactgagtttagtgatgaccttaagggagcactgtggtaaaagttaggggcagccctttccagtcttggtgtcggcatattttgattttgaagagaagactggtggagtgaaaactagttaggaggccatttccgcttaatggctagatgcactttgcagagactttaaagtctttaaacggcttttatccactgcttgaagtggtctccttaggcagatgttcatggtcttttagcactaatccagctagatgtgtataaagttataccaacaatacataattgaatgtaaataaacctagcatattgcctgcttccacttttcctccagtatggaaattcagtttttgatctatgtttgctagttgatctttatcatcgctactctcatgagatgtcaacaggttcttgaagctctttacttaagccaccaatcagattctaccttttcacttcccactccctgcccactcaccaaccacatgatgcatatcctgtgtgcctcttgttggcctattagcagctgcttgaaggtattgccattcatgttatagctatttacagctgaggttggaagacacctacacacgattatatttggtatgtagccacctggattttttttttttttttttactttaaaagattaatttggtctttggaatatacaatatagcttatgttttggtacatcatgacttttctgcaaaatgtatagggtttagcttagtgctctgcacaggttatgtactcaatttataacctctggactgtagtgattaagagtgtagtgtcagccgggcgcggcggctcacacctgtaatcccagcactttgggaggcggaggcaggcggatcacgaggtcaggagatcgagatcatcctggctaacatggtgaaaccccgtctctactaaaaaaatacaaaaaaaaaaaatttagccaggcgtggtggcaggcgcctgtagtcccagctactcgggaggcggcaggagaatggcatgaacccaggaggcagagcttgcagtgagccgagatcacgccactgcactccagcctgggcgacacagcaagacttcgtctcaaaaaaaaaaaaaaatagtgtagtgtcaatctcagtttcaccatgttgcacgtgttttgaatggtgaactgggagttgtacaatacggttttcagacagattgagtatgaatcctggctttactagtacctccctttgtgacttaggcagattatttaacctctgtgtatatcagttcattcatctgtaaaatggtgattaaaaatggttttacctcattaaattgttacagtgagaaaagagctaatgcatgtaaggagaacatagaatagtgcctggcacatactaaacatttaataaatattaaccattaaagttatgactctaaaatagcagataaagcttgtgacttctaaaaattatacattgtgatcaagtggggtttatcccagtaatgcaagggtggttcacctacagaaaatctattaatattttataacagaaaaatctattaatatttttaacaccttaagcaagaaaaatcatgtttatctcaattgatgcagaaaaggcatttgataagcttcagttttttttatgccttaacataaaggatctttacgaaaatccatagaaaaatttggggtgaatttcttttaagcttacaaacaatacagtgaactgtataacactttacatgaaataaaaatgtgtgcacacagaaggagcctctggcttttagaaaagactcctagtaatcctcagtgatgctgcttaggccaattgggaggtcttcatttgggggtctaactggggcaagttcaatctcactgtatttattttaaattacttaatataggaatattagattgatggtgtttaaactcatgaagaatacttctaaaaattcaatacaagtttttgagtttggactgagaaaaactaagcttctttcaagtagttttcatttaagtaattactcaaagttagacataaattatcatttttgttcataatttctaacaataattagaactttgctatgtgctgaacacttcttatatactagctcattaaattctcacaataacactataatgtaccattactattcctttttacagatgggaaatggaagattaacagaagttaaataacatgcctaatgtcataagccagatgttaaaattaggtttctttaactctaaaatctatgttcttagctagtatacactgcctggcacttacatattcacagcagacttattaaaatttcatttgtatatctgcaggtaatctgtgagaacatataaaataaaattaaaattttacagcaagttagttatctgcaactaccacccccaatcctagtcttgtctggattaacttgagaatatctttccggatatatattcacatatttatattcatttatttacatatatttgtataaatagaatatgagacttttaaaaacacacaaatacaatgggcccttaagcaatgcaggggctggggtgccaactccacccccctaaccccctgcctacagttgaaaatccatgtataagtcgattaacacattttgtatgtttatatgtattatatactgtattcttaaagtaagccagagaaaataaaatgttattaagaaaaattataaggaagagaaaatagactgtttgtaagtggatcatcataaaggtcttcatcctcattgtcttcatattgagtaggctgaggaggaagagaaaggaggggtggcagaggcgaaagtggtggaggaggtggaaggagaggcaggcacactcaatataatttctattgaaaaaaattcacatataagtggacccatgcaattcaaacctgtgttgttcaagggtcaactgtatacatatacagaaggagaacctatttgactgtcatcttaaagtcacagattaatgtgtcaaattaatgtatttgtgttggttaatataaatgcttctatgtggcatgtttagtcaagactctttccagtgaaacttagtttaaactggcttaagcgaaaaagggaactcttaaaggctcataactgaaaaatcttgagctacagctgacttcaggccctgttggaattcaggttgtgagatgatcttccatgccaggaatctgactctcctctgctccgctttcctgtgttctgccttcattttcaaacaggatttccccaagtgtttgcaaagatggagccagcagtccaggcctacattctattaccataacaatccttctggaaagagcttcctaaatagctccagaaaaaatctttgaaagactttttattaggaatgtgtttggctataagtagtagaaaattatagtggtttaagaaataagatacatgttttcctcatatcaagaggtttcctccatagtctggagcagatagagtagcttacttgtgtcaaggatccagctttttcattttctgccctgccatctttagaatgttgcctgcatactatatggtaacttgtcaccatatgactgtagcttgtccagaaatcacatcgatattcaaagcaagaaaatggaggaaagaaggtgcattagcagtatctgttcccttaatcgggaaagcaaaagctttcctagaagcctgcttagcaaactcctgctcatatgtcatcatccagaactgtgtcatatgtgacctcctagctgcaaaacaggctaataaagtgagtatttagcttttctgttctatataataaagtcagataaggaaaagagggttgagggtatatattgggttagccatcccattgtctgtcccttgcctatttcagaccatgtgtccatcctggagctggtcatggtgctcaggaagggtatcatttgattggccaggcctgggtcaggtgcccatccttaggagttgggagattgcaatcaagcctaatcaaaccacttggtttgggagtgaaagggggtggttccctaaaggtcagggaatcctgggcagaataaaacactgtgtgatgtttcaagtttattatctcttttctacaactcaaaatcttgaatgaagggaagtatagctgccacagcccacgtatctattaaagaagatagttcttcaactgacctgttgataggattgaaaagtctattgtcagctcttagtcctcttgttcttctcttataattaggtttaggtcttcagttttcctcagtttgttcccacctaattgtgtcagaaatagataacaatatttttgcgaagtgaagatagtcctgtctcctgacaggaaccatatcttatatttaacagactttaaggatcttagagagttcattcagttcaaacttattttataggtggggatttatgtcaccccagagtgcttactattgtgtactcactgtgcatgctcacttaatgttactgactgatcatcacagcttctttactgccagctaaggtctaaaacttacatgtagttgaatgaaaactaataggaacgtctgctcgggacacttgcacggtctagctgaccctgctgtagcaaccagcatgctgcagttagcttatgatgactctggcatatcatttagggccactcacccaagtccagaagctcatctttgcttcatttaattaatcatagtcattaatagagaactctttataccccttcctgtcctcatgattcagcactggcacccactcactcccacattgctaagttacttataaacttgcagaacaaacagaaaatggagcagtttattttaaaggaggaaatttaacatgtgtgaatgttaggagaattggcaaaaatatttccaaatgagatgtttagggcatattttttttttcttttgagacagggtctcgctctgtcacccagactagagtgcatagctcactgcagcctcaattttccaggctcaagcaatcctcccacctcagcctctcgaataactgggactacaagcacataccaccctgcctagccttttttattttattttatttttattttattttattttaagagagagggtctcccggctgggaatggtggctcatgcctgtaattccagcactttgggaggccaaggcaggcaaatcacttgaggtcaggaattcaagaccagcctggccaacatggtgaaagcctgtctctactaaaaatacaaagaaagttagccaggcatggtggcagacacctgtaatcccagctactcgggaggctgaggcaggagaattgcttgaacctgggaggcagaggttgcagtgagccaagatcgcgcctctgcactctagcctgggtgacagagtgagactcaaacaaagagacaggatctctctaagttgcctagtctcaacttcctgggctcaagcagttctcccaccttggcctcccaaagggttatgattacaggcatgagccaccgtgcccagttctagggcatatttctaagcattcttggtttttttttttttttttttttttttgcttattcagattgattctattgcacttaagagaaatgtaaacttcttgtttgttgctgatatcgtggtccaaatggttttaacctaatggctggtgagttagtgggaagaaagtgaacttagaaatgcagtatctgtagcacttcgtctttcctgtggagccaatgctagaaactaaaattttaatcgttgtctttctgaagaaccattggcatgaataaactgacacagaaaaggagaaagtatgtaatatggctgttctaggctgaaatgatacttttatttttattgtatttgttgaggtgtccttctataaagaaaggtgaaatttggtggagggagaaaattaaaatttcaggtagccttaacatcactcattttattttcttcagccactcattccatacccagttgtctttaaaaattctgccttttaatttgttctctgtcctcattcactggcatatagaactacttatttgcctgtcttccttgcccaccagagaagtctttttcatcttcattacttcaataactaacccaggccctgacattgggtggttgctaaatgagtagcaatgatgttaggaggcaggggtgtgtgtactggtgcagtttaacagatgagaaagccaaagcttgagtgacttacctaagtctagtaatggcaaggataggattcaaactcatgtcttctagtacttcttccagtgttccctttgctaagctatgacatatcttcaccacaaaaatagtttgagtagtttcactttgagagtggaagggaaagaactgtttatggtgaggcaattcaattgtacgaattgtctggaatttggctgccaacctgcacaggctagtaaaaaagaagacagctattcacagtaaaaatttttcaggaatatcaaattacttcactttacacaataaaaaaaaattcttgtgtaaaacacatgtaaattaagttataagttagagcctcttccccatcactctccacctctccttattttgactaatacagataatttcagagctttatagactcacacatttttaaacaagaaatacttaggctgggcatggtggcttacacttgtaatcctagcacttcgggaggccaagatgggaggatcacttgagaccaagggtttgagatcagcctgggcaacacagggagaccctgtctctacaaaaaaatttttaaaaaagttagtgagggtgggtgcggtggctcacacctgtaatcccagcacttggggagtccgaggcaggcagattgcctgagctcgggagttcgaaaccagcctgggcaacatggcaaaaccccgctccactaaaaatacaaaaaaattagccacgcgtgtggcaggtgcctgtaatcccagctactctggaggctgaggcaggagaatcgcttcaacctgggaggtggaggttgcagtgagccgagatcagtcacaccactgcactccagcctgggagacagagcaagactttgcctcaaaaaagaaacaaaaaaaaagccagccgtggtggcacatgcctgtagtcccagctactcagaaggctcaggtaggaggatcacttgaggctgggagttcaaggctgcagtgagctgtgatcgtgccactacacttcagcctgggcaatagagcaagactctgtctcttaaaaaaaaaaaaaaaggaaaagaaaaatacttctctttttattaccaaggaatagcgagttggtctacagatacttgaatgccaaatatactgtatgggttctgtgcatatatgtaacttttttatccagagtaatcttatcaagactcacacaaggctgggtgcagtggctcacacctgtacaaatcccagcactttgggaggccgaggagggccaaaggcttgagctcaggactttgagatcagcctgggcaatgtcacgaaaccgtgtctctaaaaaaatacaaaaattagctgggtgtggtggcgcacgtctgtagtcccaactacctgggaggccaaggtagcaagatcgcttgagcctagtaggtggaggctgcggtgagctgagatcgcaccattgcgctccagcctgggggacagagcaagaccctgtctcaaaacaaacaaacaaaaaacagacatacaattttagaactaaagtaaacttcagaaatcagatggtccaaccccctcattttatacttaaagataccaaggttaagacatgttggatttatctaattagtgacaagacagagctagaacctcacctaatcttatctctattactctttgatcctgaagaaaacttatatataatgaataattacctcctgatgattctgaggtatcttcttggtgttgtttttgtttgtttgtttgttgtttgtttggtttttttggattttcctacatggcttttgttggaaggaagatatataaaattcttgatgttaatagttgtcctagcaggattctgaggctatgaccaaggtccaaggaaaccttttagtgttctgcttctcctgtttctggtgttgtggagagcttgacccacatgagacctgtttatgttgctgttcatgctgctgtttctggccttccagtgctgaaatggcaggagctttctgtgatattttgaattttcatctactgacaaaccagaaaatacaaggcagactacccacaggaaatttatttaagagtttgcaagtaaaacttccttccagtttgccttgaaagtaatgtagtgttgctgagatggtcaaattctcccaaacataagccagactgccttcccccaccaccccacccctgtttggagctctgttctcttgttagtagaccattaatgatgtagtaacaaaatgtaaatgccctgaccctaaagtggtatgatgaagcagtgtctgcagaagagatcaggaccagataaagataccacacggttcacagatggctttttaaattgtttttcaaatgagagaaacacatatgttttttaaactctcttttaagtttttcccacaaatataatcatagtgaagcaggctgggcattatataaaacaagaagcccaggaactatgaaaggctgctctagtctgagattatatcctaaaaattcaaagttttatagggaacccctgaagaaacagaggatgtaaaaaggatttagagaagctgggcacagtggcgtgtgcctttggtctcgactactcgggaggctgaggtgggaggatcgcttgagccctgcctgggcaacatagcaagactccatttctttaagaaaaagaagaagcagcagcacttagagctaatgggaagagatcagatccagataaaatacagtttatggcacttgagcctcttcactttccaaagcatagtgaaggtcaggggtcattactcctacagttaggttttctttaggctaggctttgacttttttttgtttttagaatctcactctgtcacccaggctagagtgcagtggcataagcacagcttactacagcctgaacctcccaggttcaagcaatcctctcacatcagactcctgagtagctgggactactggcatgtaccaccatgccgggctaatttttaagttttttgtagcaatggcatctcacaatgtttcccaggctggtctcaaactcacaggctcaagcagtccttctgcctcggcctcccaaagtgctgggattacaaacgtaagccaccgcacccagccttagcctgtgactttattgttatttgagttgattctcatatgctttgacctaccaaactttctgaccacagaaaggttataagtagacggcaggtctaaaacccattaggaaaatcatttaccccactaagagattagttttttgtttttttttaagtggtatgaaagtcaagccgataataatttggccataagtctagaactttcaaagcttgaggaaaaaattctctgctaaaggttgtattaagcatgggaagaaaaggagtctctaaacattttttgtcaccttccttaattctgccttttttatgttagagataaataatttacttgtgtgagagacagagcaatgatgccatttacctgctctgtcccctgacgcttctagcagtgaaatggaagctttataagctctatggcttctcaggtcattaaagccacctccctgcttcacagaagtcagatatggccatgtggatatgcctaccacttatgaaggcaattcttgagtgagaaatcaatgctaaaggccattcagattgaaccatcaaaaccaatggtgtactttcttacaggttctgtaagttcttgcatgtcctttggctcctttaggactaatatctcagcacctttatggtaatgtcataagacatagttcacattcttatagtttacatgctttgcatgtggcccaggttttaaaacctttcaatcttttctctcccacccctaggcatgtttgattatcattcttgccaaagcatttaagatgtaaggctaactaaaacccatttttggccatgctctgatcccacattgtttctataaactcaagcttctgtacctcattgggggtttggggctttatttggaagcctcccgtgtacgcacgataaataaatgtgtatgccttttctcctctttaaaaaaaaagatggctagcaggagtgccatatttgcaattcgttttcatttttttatagactcttttgtgctttcccctacagtgggtaatcatgcaatgtaaaaatctacggggatggacgtggtggctcacgcctgtaatcccagcactttgggaggccgaggcaggcagatcacttgaggtcaggggttcgagaccagcctggccaacatggcaaaaccccttctctactaaaaatacaaaattacccaagcgtgatggcacatgcctgtaatcccagctactcgggaggatgaccacagaagaatcacttgaacctggaaggcggaggttgcagtgaaccaagatggcgccactgcaccctagcctgggtgagagagcgagaatccatatcaaaaaataaaaataaaaataagtaaataaataaataaataaaaatgctacgggaagttagtaacaattgttgcttttgaagactggttactgaagggaaaactcattctccttgagtttagacacacattgccttttgaactgagtacttaccttatcataaattggctgtattccatagctgtttacacaaagactcacttaaatatttgaatttttaattttttcacagccatctcttcctgtactctataccctgtctagccaggctacacatgaagctgttcatctcctttgcaggatgttggtctttgatccagtaagtagtgtttttttttatatatttttaatgaattacaaatacatgtgttcgagagaaacattgtggttttgaatagattggcaatgtaaataattacttttcagaatataaacttcaatccccagtatcatgtgtatcatgcacgctcatcacacagaagtttgattattaacacataagagtctaagggaagagataaggagctggatcttatttaactcttatttcttatttatctcattatttgtaaaaggagtttgacaccaagttaagtcaagacaaaatgattttttgttttgagacaaggtcttgctctgtcacccaggctggagtgcagaggtgtgatctcagctcactgtaccctcaacctcccaggcccaagcaatcctcctacccgagccccctgagtatctgggactacaagcatgctcagctaatttctaaatattttgtagagaagaggtctcactatattgcccaggctggtttgaactcctggagtcaagtgatccttttgcctcagccccgcaaagtgctgggattacagatgtgagccaccgcgcccggccaggacacaaagttttttaaggttatttgaaaaaaaaatctgaccattatattgcataaggaaatgtttgctctgtgttgttgagatggaagcttttcccaataccctttctggacttgactcttctggaacatactacaaattatactgtaagttcagctcttcatttattcattcatccaaagaatatttattattcacatctatgccaataactattgtcaaagaagacttaaaaatggaagcatttagtaaagaaaatttaacttgccaagaatacaaagtcaccaaatacgaaaaataccagatatttaaaagataaaacaaccacaaaattaccaaagttattaagtttacattggtccatttgtagtgagaaagctgcaactttctcagaagatatcaaattcacaaagcttcagacatcagcacagcaaagattagggataaaaataattctgttaaggagttcaggtttgtgagaaacagtcaaggtttttttatttgggggaccagaaccaattagggtgacccaaattatttttgtaatgtctcagggtacaatttagattgcttatgtgtttattttggtgttttttgctgttgttttcttttttgtttttttactgtggtgtattagtctgtttttacactgctgataaagacatacccaagactgggcaatttacaaaagaaagaggtttaattggacttaaaccttaaagttccacatggctggggaagcctcacaatcatggcgggaggtgaggaggagcaagtcatgtctatatggatggcagcaggcaaagagagagagcttgtgcagggaaacacccctttttaatctggtcagatctcatgagacttattcactatcacgagaacagcacaggaaagacctgcccccatcattcagttacctcctaggtccctcccgtagcatgtgggaattcaagatgagatttgggtggggacacagccaaaccataccatgtggtatgtgaagtgcttagtgatactataagcctgacaaagtggcagttcttgctcccacagtctctctttgtgatcaagttcccactattaaggacaatttcaatcatataacttgctttattgagctagtgatttactatcatttgatattttgtgttatttggtaagtttatctacataactaacagaagatgttgatcaatatgttaaaaaacaaactccttttatatggttaacaaaactagagctgtgtgaaattcaggcttcagaggtaatttctgtctgaccatagaggattttataaagggtctaggattgaaatttatgtgttagaaatattttattctctatttctatttagatttggatccaagaaccatgtaactcacctctaccaggtgtgcatacactgtttagagctgtaaggcatcctctttctctgagatcccatgttttgtttggtttggtttggtttggtttggtgtttttgagacagagtctcgctctgttgcccaggctggagtgcagcagcgcaatctcagctcactgcacctccacctcccgggttcaagcgattctcctgcctcagcctcctgagtagctgggattacaggcacgtgccaccacacccggctaattttatatttttagtagagatggggtttcaccatgttggtcaggctggtctcaaactcctgacctcatgatccacctgccttggcctcccaaaatgctgggattacaggcatgagccaccgcacccagcctagagatcccatgtttattaatgctcccgatctgccaggaaggtagtgtttacagtctttaaggctggaacttcctaagccatagagcaagtagtaagcccatttttctgggaggtcttttgtacacaagttctacatgtgacatgtagtccttattccttaacagtgggattatcacacttaattaaatgaaatttgtggtgtagttgtagttataaagatttatctaaggagaaagatttatctggtaaggaagagtatatattcttttggaacctatgtaagtaactacatagtcatttaaaaataaagaaattaggctgagcatagggcacagtggctcacacttgtaatcccagcactttaggaggctgaggcaggagaatctcctgagcccaggagcttaagaccagcctgggcaacttagggattacaaaattaaaaattttttaaattagctgggcgtggtagcacatgcctgtagttccagctactccagaagctgaggtgggaggatggcttgaacccaggaggttaaggccaaggccacagtgagccatgagctcaccattgtactccatcctggcaagggagacagagggaaaccctgtctcaaaaagaaagaaattaatttatttaatgcacactacataataattaaccatttttatcactgtgttataaacaaagccgacaagtttgttactttgttacagaactatttttaaattagcctgatgctttattagcttttgatctatattaaggattttttttatttccagttctgagagttcaatgagaacaagaaaccatttaaagagaggtttgttctgattttaacctgttaaattgaaagtcagcaatacattaagaaagaaatgaggtgtgtttgtgtgtcagggtctcactgtgtgacccaggctggaatgcagtggcacgatctccgctcaccacaacctccacctcctgggttcaagagattctcctgcctcagcctcctgaatagctgggattacagatgtgcgccaccacacccagctaatatatttttatatttttggtagaaacaggatttcaccgtgttgacaaagctggtctcgaactcctgacccaccttggcctcccaaagtgctgggattacaggcgtgagccactttttaaatatccatgaagaacagaccattgaccataattaaatcagtgtatttatttagtccatttagtctgaggtaactagttattcttgttttgttgatcttgggttaagcagtctactgccatcacatgtctgctcctgaactgaaatgatgactcaattacttgattcagtctaagagcaggtgtctgtggtgagatacacatacacagacaaacacagacacacacacacacacacacacacacacacacgctgaacatccctaatttggaactttgagtgccaacatgacaccacaaatgacctgacctcagtgacaggtcaccatcaaaaagcaggcatacaacacacagtttgttcagtatccccaagggaaaaaagacccccagcctccttcagctgtgattctatcttccccaagcatatccagattcccccatgcaaatgtgcccacaaagggtaataaaatggcacatctgcaggccagatgcaccaatgacaggttccccacaatgtcccacatgctgccaagacctataggcattatttactgtattttttgcctattctgtgctctttggagtaaaaatattgttgaaaatgtcaaaaagtcctgcagataacccagcaggtaactgatttttttaaaaagaggaagcatttctgtttatagcacagaatgccaagctattggagaaactgcacagtggtgtaagtgtgaagcatcttacagacaagtatgttgttggaatgatcactgtatgtaacctaaaggaacagaaggataaaccgttgaagttctgtcctgaaactcatgaacagaagttaaagaaaaatagaaggaaagggaagccaagggctcagagaggcctgggatcaggcacatacactgtcagcctacttgttcctttgggttcaaacagtggaacactatcccagtggaatctctaggaatcgctatcaaaggactcagacttttttagaaaaaaagaaaaggaaaaagtttacttgctaagaatgcagggaagtcagacttcaaaagagctagatcaccaaatacaaaacataaacttattgaaaggaaaaaaaaacaaggttatcaagtatacgtttgcctgttcctggtagataaacacccgctttcttctgtgattatcttatcttgaaaggtcatgacatgcctttttacatcagcatagcaaaaatcagtgataaaagtgtttttagggaatccgggcttatgagaaacatttcattattatttgggaacgagaacagttgtttttggtttatctgagaacaaaagtggttttcatttttaaattgtgtaatgtgaagaagtgcttggtcatattggaatcagggcaaagtgtgtgttcttgtttttgttctactgtgtactagtgagttcatccttaaatctttaaaatttactttcagtaatacacgtatgtctactgagctaaaagaagggacaatttctttaattttttcatggagtaatgttaaaagtttagattttcaggcaaacttaaaactcatgcattcagtattctgatctaaagtgacagaaaatgactaggtgcagtagctcatgcctgcagtcccagcacttcaggaggccaagactggaggccacaaattcaagaacacagtgagaccccatctctacaaaaaatttaaaaataaagtgccagaaaacaaaaagctagactagacttctgatattcagactgagctatatctcaaaatatggcagtcagaccactgtctgctgcctaactccagcagcttttgccatcatctgtttggtattctaagagaataaaaatttcaagcaactttgaaaattgccactgtgaacgcatcttcaggatgctgacacatatttagaaaatatagcctgttatttaaaaggtaaacgtaaccccttcaaagcactacatagttaaatgtcatgatatttgtgatttttgacccagcatacatctatttcaatgtagtaacttcttagaattttagaagaaaggcacttctaagtactttgtgatggtagataataacagtagttgtcctaaatcatacactccctctgctgctatgttacccacctctaaattcaattatccctctttggacgggatgtactataaattatatatatgctatgtcaagcagttaatgtgtcttttgaaagatcctatgtggacagtcattttatctgtagtgttgatgtgctggtctctaatttgatttcagtccaaaagaatatccgctaaggatgccttagcccacccctacctagatgaagggcgactacgatatcacacatgtatgtgtaaatgttgcttttccacctccactggaagagtttataccagtgactttgagcctgtcaccaatcccaaatttgatgacactttcgagaagaacctcagttctgtccgacaggttaaaggtgagtatctgttttggcctttggccaggcaatatgcctagtaacattttccattaggtggccatgaagagctgagatctggatggtaaccaaagctcccctctatgtttattttacaaccttgcgtatagctgtgtgtccggggcataacaaagcatatttaatattatatccaggggaaggtcggggagaggaatgaatattttgttcttattttcaaagtttatttagtgagtatgactcaaaatatgtttaatatgtattcactcagtgtcatttcattgattcaaacgtattgaactttatataacatacaaagttccataaaggataaacattcactgagggaattattccttggacgatgacaagagaagggaatttctgatagtgtactcataaaattttgtggcaggatctcctattggaatacagtgggagtaatgacatccaaaattctgagtgattttagtgtctactgtaggacattttacaagagagagagtagtccccaaagtaaccacctgaaactatacacctagataccaactgaggtctttaagtgatcttcaaaaaggcaataattgccagcaacttagaagagttcacccataatgccaaacctgtggagtctctctcaaatttataggccattttactcttcccactgatggggttgcagtctgtgtaatgccaccagtaggtttcttatatttagcaacagctgtcattttagttttaggaagttcagctgaattctgcttgatagatgatgtgtgtgtttgatttaactaaaccagtaggcagtgcttttcagatgctggctagagttcgctgagaattcactgctcccgggcttgcaaattgtcatggattgtatgatgtttgttttctccacagaaattattcatcagttcattttggaacagcagaaaggaaacagagtgcctctctgcatcaaccctcagtctgctgcttttaagagctttattaggtaactatatgtatgtaattcaacattcttgttagaattaaaaggatgccagtgttacttcattattcagcatatttgtttttatttagataacatagataaaaggtgcaacagaaagtttctgttatgaggtttggctttagtcaaaagtgtattaaaactgtaagcatctgggctgggcgcggtagctcatgcctgtaatcccagcactttgggaagccaaggcagacagatcacctgaggtctggagttcaagaccagcctgactaacatggagaaaccttgtttcttctaaaaatacaaaattagccaggcatggtggtgcatgcctgtaaccccagctacttgggaggctgaggcaggagaatcacttgaacccgggaggcagaggttgcggtgagccgagatcgcaccattgcactccagcctaggcaacaagagcgaaactccatctcaaaaaaaaaaacaaaaaactgtaagcatcacattttacactggtgccagttcactgcggttgctttggcaattttttccccggatgaccattgtgctgcctcatcacatatatggcagtcctgctgcagcattagtatggtggccacctgtcctggagttagacgtggtcatctcagttcccactaccattctcactccctagtaataactgcaagcaagaaaataatttttttgtgtgtaggtggactgctggtgtagcctatttagaggagaagtcaaaaggcatatggtagagctatgaacctacattggaagttaccaggcttcattctccttgtctgtctgtcctttccttctcttgatttctttttccttaactccttatatattgatcagggtctaatcgggagaaataaaccacttccctagaatacaaacggggaaaattcagtaataagaactgttaactaggaaagatgatcaactgctaaaaggcataaaagaggattctgaaggctgctgaagtagcaaatgcagaaagcagccactccctgtagactgagggagagtaaacaagaaaggaattaagaatttagaagaggttcctcatgtaaggacctctttggagagggtatggctgccacaggaactggaacacacagcacgagggtggtgcagaagaggaagtgtgccagaaggtgtggccagaactggtccatcaaagactgcctgccaggagagttcgggtggaccaaagctgagccttccacatgaccaaaaacaggcacaacaaaccaaggaagggagactgcttcctgatgctacagccttgcaaatgcccttccagcaccctctgttgacaaaagctaacattaagctaggtggcaaaggggaaccatgaacagggtctggctccagtatcacaaagcaggacaaagggtggattcggatatgagtggtcacacagtctctatcttccccgctgcctttctcctctcctttttctctcttcctgctgccctttccctttaatcatattaaagttggttggatttgttggaccacagtcaagattttatgcttaaaatttgcaaaatcaggtgactttcatttcttccatgtatttttctattggaagaaggaattaagttgcacttttacttatctgtggttttaaattactttgttttactattttcccctaagagtcagtgacccagtcagttaggcagtttagcagcttaggtgcaaatgatcctgggccttggggaaacaaggggttacacttttccctctcaagtttataatctaattagcaatcttagacataggaaaaagccaataacagatctagatcaccaatgctaaatgattacctatacttctccattaatacttgataaaagaatgcttataaggcccattcaaaataggccactgtattttgagaggctacttttaaatggatgattctacatcccttaaggttattttcctgattgattattgaaattattacttgtaatacctacatttactttacactttgaagtaggcactgtggaaaatacttcacatctattatcatttattcatcccagtatcctatgaggtaaacagcattatttctttccaaatgagaagagattaaggcacttgctcagggccatacaactagtaaatgacatgtggttttcaagcctacatattagccactataccagattgcctctccatagataacaggtccataaacaagcaacttagaataaattcaacttcaaagaaacaaataaaaatccagaagtggaattaattttttcagaggaagagaggaaaacaggaagtagtgaattacccttttgtccattgtgacattacaactaatttctccatctctgttttcttccagttccactgttgctcagccatctgagatgcccccatctcctctggtgtgggagtgatggtggaagataatgtactactgaagatgtaatgtagctttccactggagtctgggatttgcaattctggaggttaatcatgcttgtactgtaattttactaatgaagttttaaattaacaaccactacttgtatgatatgaataatatttagaaatgttactagacttttaatcttgtaaagtggttgtgcttttagaagaaaaatattttacccagagttgcacatgttttatgaatttagtgcagctgttatggctcacctcagaacaaaagagaattgaaccaaatttgggagtttggggttttatgttttgtttttcttttctaaaatgaagtgagattgttcacacacacacacacacacacacacacacacaaacacaaaggacagtcatacattttgatatttgagccattcctaaagatttggggttttctaaaactaaagaatctaggaaccttgcctgcgaccaatcatggagccacgtgagctgatcgtggctgcacctggggggagggtagggaggaggggcatgccacctaatgatcaagccctataattagcttctcattagagccgtgatggtgatgtgtgctgtctaaaatccaatgttgtgggtagagagaatgagtttgtgactaggagagactaaacttttgttttccttacccagtataaatatatatatatatatttaatctatttttattagaagtttttctgctctttcttacataaaagaaccccaagcatgcatctttcatgtgtgtaaataattcatttctgggctaatttcaaaagaatcccaatattgctgtatagaaagagaactagcttgcacattttaggtctgtgaaattttgtgagacttttcctgcactggacagtaaaaaaataataaaagacaaaaacaaatttaaaaaaaaatttaagccacaaaaaaaggcacatagggaattatgtcaaatgtgtttgtgtccttaggcaaagctgtgggagtcttgaaatgtcacagtagtaaataacttattactttttgacaagttctttttttctgttggaacactgaattcttctgtgcatatgtacatatgaatacaaatcgaaggcctctacctcctggagttatacaacttggcttgtttacctccacatgctgatgatgactattttttttttttgagttcagtgtggagacttgaaacttgaatgtcccttccaacttttatattaaaaataaaaagacaagaaaattgaagatcatttttcacctgtacaaggaatactaatggatcgtcttaaaattggtctaggaaaaaaccttggtgtgtgttatggacaattaactgttaaagttattgtaagttatctgtatttagcagagtattttcaacttgagtgatctgagctgaatttgaagactattaataagttatgtttggaagttttaacttcaatgaagtaattatttgctgtgaaagaaacaaacattgaattactaaacaaagatggtgcaatatctttgttttttttttatgaggctcctgagaatcaacccaactgaagcatttcaattcacttgaatgagaaacgtgtttagtatcaaaagagcccaagaagacactggtgtgaaaggtacaatctcagaggttggtcaattaccgtggcacactttctggtcactttgtacaatgtagatttgaagtacagtggtgaaaacattaaatgtgacatttgaaaaagatgtgtcatctgttttatttcagtttctttcctttgttttctcttcagtacagctcgtatcctgactttgcaaagttttgagacacttcctatttatatttccactttgatctttgaggaaattggttgtttttaaaaatcttctcaaaaactttagattgacaaaaacatattgaaaatttagttaaatcaatatcaaagatgtgatttaaatatacacaatagagaagtctttttagaccttggagtctctaatccagtggttttcaaacttttttttctttgaagcaatatcttggagtccaatatattaaatacataaaagtagattgctctgtatgaagcagactggtaaagggacttgacacctccctcctcttcacttctgcctcctgcctctagcagcccaaaggtactttcagctaaggaagaagtcccagcccagtggtggtgtaatcaaggcctgaaaccagactgcctgacttcaaaatactttccctgaggctagataaagcaacattactcttgagtttgtaggtggcgtgtacttctccctatcttttttatttagcaaaatgaatggattttttttcctgacattgaggcagttgactattctaactcatgtaaattaatataaatacatttattattcattcaacaaaattttgaatacttactaagtataagaattacttgtcaagaagccatattaatatcaccaatgcttagataaggaaaccagttttatcacttacaagagagcattttgagttaacacatatcattttgaaactaaattctgaccgggcatggtggcttacacctgtaatctcagcactttgggaggctgaggtgggcagatcacttgaggtcatgagttcaagaccagcctggccaacatggtgaaaccccatctctactaaaaatataaaaattagccaggcatggtggcgggcgcctataatcccacctactcaggagactacggcaggaaaatcgtttgaacccaggaggtggaggttgcagtgagctgagatcgtgccagtgcactccagactgggcaacagagtgagattctgtctcaaaaaaaaaaaaaaaacagaaactaaattcctttacagataagtatttgagaaaatatattgacctgctcttactggaacctacttagaaaaccaaggagatttgttccttgttgctttatttttgggaattgcaaaactgtggagtcagtgtggacaggtaagttagggctataatcacctacaatttgtgtgcagtttaagaacatgtggaagatgcagattatctcttacgatgactcataaggcttagaatttttgtttttttttgtctctctatggtatgttatttaaaatattactttatattaaaataagaatagaatgcaaaatttgaattttgaaattaagacaacttttaagatattttcagaaaacaaattgagtttactgttaacagagcctcaccaaaggcagttctaaaggggactgactttacttcaagaagatgacatacttcaagaggaagaaaaagaataactaaaagcagatctccaagaatggtgaacaaagaaatcagtgaacacatgggggaaactaagcaaacacagattgcatataataataatgtctggttgtggggatgataaattacagcagcaatctttaaactggggtacagacacccctaaggataaatgaagactccaggaggtacatggcacatatgtttgtttgggtctttttgagacagagtcttgctctgtcacccagactggagtgcagtggcttgatcatagctcactgcaggctcaacctccgaggctcaagtgagcctcccacctcagcctcccaaaatgctgggattacagatgtgagccattcacccagccgagcacgtatacttttaagagagtcaacttcactaactttttttttgaggcaggtctctgtcacccagactggagtgtagtggcgcaatctcggctcaccacaatctccgcctcccaggctcaagcgattctcctgcctcagcctcccaagtagctgggattacaggcacatgccactaccacccagctaatttttgtctttttagtaaagatagggttccaccatgttggccaggctggtgtcgaactcctgacctcaaatgatccacccaccttggcctcccaaagtgctgggattacaggcgtgagccaccgtgcctggccatcttcactatttttttttcctccattctcttccggagttttattttcacatccctcttcacagttattctcccacttgaaagacgaatttcttacacatcttagatattaatgtggtgcaatatacctaagtataaaaacttcctgggttgccaactacagggacaatttgaaacaggttttgcttatagagacctcacctcttgcatctcaccactgtcaggtaatccatcaatcctgagagaaaacccctggaaagtaaagcaaagaggacactaggaagaaatactgggactggtggtattttatttcattcaggcagcaaattcgtggcacagctgtgtctgtcttaaaattgagaagtcagaaggtttttgtggaaacacatataaaatgaatgtagacctttcccaatagaaagtaaatcggttttgcccatgtggtttgccagttaggactttccagtagtttatatggtagacgttttccgcaattagaatgagcctgaatctacagctacgaagttttggggaaaatatatttaaagcaaaagattaaaaattaaccaaaaatattgtagaaatactggcgaggatgtgaagaaattggaatccttgtgcattgctgctgagaacgtgaaatggtgcaacagctgtggaaaatggtatgccagttcctcaaaaaaattagacaccaggcacagtggtgtgtgcctgtaatcccagctatttgggaggctgaggcaagaggattgcctgaggctgggtgcagtggctcacacctataatcccagaactttgggaggccaaggcatgcggatcacctgaggtcaagagttcgagaccaccctggccaaaatggtgaaaacccgtctctactaaaaacacaaaaattagccaggcgtggtgatgggcgcctatagttccagctactcagaagactgcggcaggagaatcacttgaacccaggaggtagaggttgcagtgatccgaggtggtgccactgcactccagcctggatgacagagtgagactctgtctcaaaaaaaaaaaaaaaaaaacaaaacaaaacaaaaaaaaaaaacaactagataaccaggaaatataacagccactaaaaagaaaaaaaagttattgagttctactttgtgttcaatatctctgtgctggccatggagattatcaaaacaataaaatgtcaaggagcctatggttcatggggatggaaatacaaagaaatcacaacatgatttcagctctgctctgagacagggttgactgccctggagtactcaggggtggcagctaacccaaagcaggtgaagtggtcaggtaagcttccccggagagctgaattgaggataaattagagttagcctggcaaagagaggtgatccgatctgtgctttcagttctttatatattctgaatacaggtcttttgttgagtatgtgatttgcaactattttctttctgtctgtagctggttttttcattttcttaacattgtcttttatagaacaaaagtttttatttatgatgaagtccagtttatcaatcgttttcttttgtaactcatggttttggtgtccagcctaagaactctgcctaaactgaggtcatgaagattttctcctacttttctctaaaagttttatcattttacatttcttttagatatatgatccattttgagctaatttttgtataagttgtgatgtttaggttgaagttctctttttgtatatgaatgtccactattcagacaccattgttggctctaggaatctatacatgtgttaaaactcataaagctgtacaccaacgaaagagtcaattttactttatgttactttattattattaattttttgttttgagagggagtctcgttctatcacccaggctggagtgtagtggcgcgatctcagctcactgcaaccttcgcatccctggttcaagcgattctcctgcctcagcctcccaagtagctgggactacaggcgtgtgccaccatgcctggataatttttgtattttttgtaaaggcggggtttcaccatgttggccaggctggcctcgaactcctgaccacaggtgatccacccgccttggcctcccaaattgttgggattacaggcaagccaccacgcccggccaactttgttacttaaaaaaaatttttttttttcagttacacttttataacatgcacatccgttttaacgcttatactggcaaggctgttgacctttctctttgtgatttcttccagggcttttactcttgtaaagctctctttccacaagaggtctgatgattctaggaatcctttctccattcagttgcctttgcactttggtcaaaaatcaatttgccatatttgcatgggtctattactgtactttctattctgtcccattgacctagctgtctgtaattctgtcatttcacctgtatcacactttgtttttttagacagggtctccctctgtcgcccagactggcatgcagtgggtgtgatcttggctcacatcagcctccacctcccagggtcaagcaattctcatgcctcagcctcccgagcagctgggattacaaacatgtgccaccacacccagctaatttttgtatttttttagtagagatgagattttgccatgttgcccaggctggtcttgaactcctggcctcaagtaatactccagcctcagcctcccagagtgctggcattacaggcatgagcaactgcacctggtctttttttttttttttttttaaagagacaggattgcatgcctgtaatcacagcttctcgggaggctgaggaagaatagcttgaacccaggaggtggaggttgcagtgagccaagattgcatcaccgcacttcagcccaggcgacagtgagattccatgtcaaaaaaaaagaaaagaaaagaaaaaacaaacaaaaacaaaatactagccaattgaactcaggaatatgtattttaaaaaatgctatagtcaggtgagatttatcctggcaatacagggctggttcagtattcaaaaatcaatcatagtaattcaccatattaacagcctaaagaattaaaagcaaatgatcaggcagggcacagtggctcacacctgtaatcccagcactttgggaggccgaggcgggcagatcacctgagatcaggagttctagtccagcctagccaacatggcgaaaccctatctctactaaaaatacaaaagttagccggccgtggtggctcatgcctgtagtcccagacacttaggaggctgaggcaggagaatcacttgaacccaggaggcagaagttgcagtgagccaagactgcgccactgcactctggcctcggtgacagagcgagactctgtctcaaaaggaaaaaaaaagcaaatgatgatattgattgatagagaaaaactatgtgacaaaaattcaaaattcacttacaatttgaaaaataatactcttaggcccgactgggccactcagacctgtaatcccaacactttgagaggctaaggcaagaggtattacttgaagccaggagttcaagaccagcctgagcaacgtagtaagaccctgtctctaaaaaaatttttttaaaaattagctggacatggtagtgcctgtagtttcagctactcaggaggctgaggtaggggaattgcttaagcccaggagtttgaagttactgtgagccatgatcacaccactgtactcctgcctgggcggtctcaaactcctgaccccaagtgatccactcacctcagcctcccaaagtgctgcactcacctcagcctcccaaagtgctgggattacaggcatgagccactgcgcctggccagctaatattttgttgaagatttttacatctgtgttcatgagagatattgatctgtagtttttttccttaaaatacctttgtttagttttggtctcagggtaatgttgacctcataaaatgaactggggagtattttctcttgttctattttctggaagagattgtgtaaaatcagtgtcatttctttttcttttttttctttttttttttttttgagacaggcgcgcactgtcacccaggctagagtgcaatggtgcaatctcagctcactgcaacctctgcctcccaggttcaagcgattttcctgcctcagcctcccgagtagctgggattacaggcactcaccaccacgcccagctaattttttgtatttttagtagagatggggtttcgccatgttggccaggctggtctcgaactcctgacctcataatctgcccacctcagcctcccaaagtgccaggattacaggcataagccactgcgcccggccatttcttctttagttatcctgctctactgcagacttcctatgattgtgtccgtgttcagggccaggcagcaggaagacacagagaaaagaaagctatgggggttctccttcttgggactacaactcttttgaaaaataaacacgcaaacacgtatgtgtgtgtatgaatgtatatacatacatacacacacacacacacacacacacacacacacacacagtctcagtctgttgtccaggctggtctcctgctcctggccacaagtgatccaccttggcctcccacagtactgggattacaggcatgatccactgcccctggcccacagctctcaatcagagggggaaagatttccgttcctcaaagttttgggtgtctgtggaccctgcagccactaatgctaccatcaccactgtcactctcatggaattgtctaggggctggagcacgggagaatgaagaaaagaaaaattgagttcctcttctgtctcagtgctagaccttccctttccactcctcgaggcagagccagcacttcccctgttgatctttctttcttttttttattttttgagatggagtctcaccatgtcgctcaggctggagtgcagtggcacaatctcggctcaatgcaacctccgcctcctgggttcaagtgactctcctacctcactctcccacatagctgggactacaggcgcctgccaccacgcctggctaatttttgtatttttagtagagatagggtttcgccatgttggccaggctggtcttgaacttctgacctcaggtgatccacctgcctcagcctcccaaagtgttgggattacaggcatgagccactgcgcccggccctgttgatctttctcgtcgccccagtgcccattctggatttggggctgtcttgtatccaggctggggaatatcagagagaaaatgagaaacttgcttcagctcagtggaacgctgacttctggctttcttccctcgtttccccgctgtttttagtttcacacttctcagagagctgccctgtgcatgtctgtccatgtttcacagcagcattcagtggaagagacagggtggagggtgcttactccatctcatctggaacctaatagctttttaaactgtcacaattatatgaagtaggtatttcttatatttgacagatgacaaaactgaggttcctagaggataagtaattttcccaagatcacacagctagtcagtggccaacccagtcatcctagccccagagtttgtggtctgagccgctagttctgcagctttagagggagctgaacacaacagttctgtggggtgaggtatggggcttatgtgttgtggacagggcctggtatctcactccctttaacctgcatggtgtatgatggaagagtgcgtagtgtttagggaactgctttcttctttgatgaagatctggactgtggtgggataggaatagacttctgtcttcaagacatgtgcatgtgtgtgtatgtgtgtatacatgcttatatatgcgcctgtgtgtaagccatgcagccattgaaagtgaggatgtggatccattcattcagcaagtattacttgaacccccaccatgtatcacacattattctaggcactggggatacatcagtgaagaaacagacaaaaacctctgccctcatggagcccccattctagtagacagacaataaacatacaaataaatcaattacatagagtgctagaaagtggtaagtcctagggaataaacagggcagataaggagaattgggagtgttggggttcagggctggatatatttattaacacgaaatgatgtctgccatatactgttgaatgcacttcctaaactgtgatttcatatgacttcctggtattccaggggaaactcatccagtaaagttcagccctttatgaagaattcccctgtggtcacattccaattcctggacctgctgccaccctcagagctgcatgctccttcttcagactttctaagaatgactcaggtcattggtggagtgaagccaagatttccaactcagtcacctgaagagatggagataccattcatggagctggagatccctgaagatatgggaattcagaaaacaagctaagataagggtgagctactacttgacctttctgtgtgtcagtttgatatctgtaaaactgggctaatgatggcacattatgtgtggtgaagactaagataatatgtgagacgtacctggaatagtacttggcacagtgtaggcacttgagaaaccttgatttattatttttgctattaggctgcattaactttaagctgactgagagatatccatggggatatgtctagaaacagtggacagtgtggatcaggaactcagcagaggagcaatgacacagatttcaggggtggttaaaatcttgggggtggatgacaactccatggtgaaaaagagaaacaagaagaaacaagaaaagagagccaaagatctcatcttggggagcaccaatgtcaaagggaagaaacaggaaaagccagtaaaaaatcactttgtgttttgtagttacaatggctagaaagagaaagaattattttagttgtttcttggttgttttttgtttcttgatggatacttttgtttaaaactttttatggtactgttgacctctatctcctcattcttccccaccatgccctgcccctggtaaccactgttttacactctgtttctttatatttagcttaaaaaaaaatccatgtataaatgagatcatgcagtgtttttctctctgtgtctggcttatttcacttagcataatgcctcctaggttcatccatgcaagtaagtttagacatctcaatgtacagaggactacagttagtaatgttgtattgcatgctggaaatttgataagagagcattttaggtgctcttttagatacacacacgcacagaactatgtgaggtgatggatatgttaatttgcctgaccctagtagtcatttctgtatgtatatgtatatcaagatatcatgttgtatactttaaatatatacaataaaaacaaaacaacaaaaacctccatttttattgtaaaacaaaacactgatatagaaaaccaggtaaaacaggtagggcacaatggctcatgcctgtaatcgcattttgggaggccgaggtgggtggatcacctgaggtcaggagttcgagactagcccggccaacatggtgaaacctcgtctttactaaaaatacaaaaattaactgggcatggtggcaagcacctgtaatcccagctactcaggatgctgaggtgggagaatcacttgaacccaggaggtggaggttgcagggagctgagatcaccccattgcagtccagcctgggcaacagagcaagactctgtctcaaaaaacaaaaaaaaaaaaggaaaaaaaaagaaaagtatgatgaggaagctgcattgcttcttgtgctcctatcccattggccagaacatagtcatgtggccatccctagctagaaggcacttgatctctgttttgctccattttccccaaccctcatgtcacccagtctctgtcttctctgcctccagacttacctgtcccttaccacaagcttgatgagttacaagatgaacaccccaaacccctggtcaagaaatagaactttgccaggccctccccacccagaagtccctctgtgtgcatcatcccaatcacagccccaccccggccccactccaaaagtgactgttactaacctgacactttcaataatcactccttgtttctttatggttttatctcccatgtgcatttctatacactatagtttagtcttgcttattttaaaaattccgatactttttttttttttgagacggagcctcactctgttgcccaggctggagtgcagtggcacaatctcggctcactgcaacctccacctcctgcattcaagcgattctcctgcctcagcctcccgagtagctgggattacaggtgcacatcaccatgcccggctaatctttgtatttttagtagagatggggtttcaccatgttggccgggttgctcttgaactcctgacctcaagcgatctgcccacctcagtcttccaaaatgctggaattacaggcatgagccaccatgcctggccaaaaatctgattcattttaaggttcttcttcttccttatccttcttgtcctccacctcctcccagtcctcctactcctcttcttctcacctcaacatcattgggtataagatttcttctaatctgaagtttcctcttctgtccctttctttttcttacaacttatctgtagaagaatctgggctgtttgacctgtcaagtttcccacagtccagatttggatgactgcatactcatgatgcagttcagtaagttcctctgtcctctatttccgcaaattggcagctggatccagaggcatgatcaaattcagggtcaatccgtttggcaaaactataggtgctggtgtgttaaccaggagactcataatgtctggctgcctctcttttaattaatttatttatttatttttggagatggagtctcattctgttgcccaggctggagtgcagtggtgcgatctcagctcactgcaacctctgctttctgggttcaatcgatcctcccacctcagcctcctgagtagttgagattgcaagtgtgccccacaatgcccagctaatttttttgtatttttagtggagatgagattttgccatgttggccaggctggtcttaaacttctggactcaagaaatctgcccgcctcagcctcccaaagtgctgggattacaggtgtgagccaccgtgcctggctctctttttattttttatttatttttattttcttgtagagatggggatcttgctgtgttgcccaggctggtctcaaactcatggcctcaagtgatcctcccacctctgcctcccaaagtgctgggattacaggtgtgagccaccatgcccagccatctctttcttttgatgacaacagatattgatactcaatgagtagatccattaatatgctggggagggccagtggtgataaatggtgatgattttctaattctatcctttatctttattgattgatggaataagtttataaagaataacttgccctcggccgggcgcggtggctcacgcctgtaatcccagcactttgggaggctgaggcgggcggatcacgaggtcagcagatcgagaccatcccggctaaaacggtgaaaccccgtctctactaaaactacaaaaaatagccgggcgtagtggcgggcgcctgtagtcctagctacttgggaggctgaggcaggagaatggcgtgaacccgggaggcggagcttgcagtgagccgagatcccgccactgcactccagcctgggcgacagagcgagactccgtctcaaaaaaaaaaaaaaaaaagaataacttgccctcatctactgtctggctatccagttcatataggacagtcaagataaatgcttgattccttctccttgtttatccagttttcaagataatgaaaaatattaaaatgaactcaagcatttaaatgtgtttgacaggtttcaacccattacattttatttattattattattattattattattgagtcaaaatcctgctctcatgcccaggctggagtacagtgctgcgatcatggctcactgaagcctcaacctctcaagctcaagccatcctcccacctcagcctcctgagtagctgggagcaggaatgcacatcaagccagttctttttttttttttttttttttttttttttgagacggagtttcactcttgttgcacccaggctggagtgcagtggcatgatctcggctcactgcaaactccacctcccaggttcatgcgattctcctgcctcagcctcccgagtagctgggattataggcatccgccaccatgcccagctgatttttgtatttttagtaaaaacgggatttcaccattttggccaggctggtctccaactcctgacctcaggtgatccacctgcttcggcctcccgaagcgctgtgattacagacttgagccaccacagccggcccaagccagctaaattgttaaggtttttgtagagatgaggtctcactattttgcccagggtggtctcaaactcctgggctcaagtgatccttctgccttgcctcccagagttctaggattacaggcatgagccactgcacctggccctaatccattacaattattaccatgatgatgctcattaagtccatctttggccagagggagcttattcaggttggttctttagtcctttggacatgcccacatgcccgaagcctcttgttttctgatttgacaacgtgttccagcctcaccttgcgtatttccggttccagagcttggctctaccacttctccaagaaatcccagttcattcagctattaaaaaaaaaaaaaaagaaggaaatcctgccatttgtgacaatattgatgaacatgttgcgttttaatgctaattaaaataagccagacacagaaagacaaatacaatttgatctcacttatatgtggaatataaaaaaatcacaaactcagaagcaaagagaggaacagtggttgtcaggggctggatgaggacggggagatgggaagatgtttgtcaaagagtacaaactttcagttacaagatgaatagattctgggaatcatggtaaagcatgggaattctggtaaagtgtggtgattagagttaatactattgtactgtttacttgaaatttgctaagagagcagatcggaagtgtcctcaccacacacatacacacaaataaatggtaactttgtggtgaaggatgtgttcatttgattgtggtaatcattacataatcattaatcattacattaaataatgtatacattatttaatatatgtatattaaataataaatttaataataaattaataataattaaataataaatattcaacccccttgaatatatacaattttttttgagacagagtctcgctctgttgcccaggctagagtgtggtggcacaatcttggctcattgcaacctccacctccaggttcaagtgcttctcctgcctcagcctcccgagtagctgggactacaggcatgcaccaccatgcctggctaattttttgtatttttatagagattgagtctcaccgtgatggccaggctggtctcaaactcctgacctcaagcgatctgcacacctcagcctcccaaagtactgggattacaggtgttagccactgcacccagctgaatatatggaatttttatttgtccattattcctgaataaagctggaaaaaaaaaaagagaaaaggaaaggaaaaaaagaccagtctagatgctatggatgttcattgccattggtttcaacattgtttctaggccttttcagtaaacagagatttccaaatcaaattcaggactgatgggtgtttatttaacctcttctgtattacatctgtaacccctttcttccacattgtaaattctggttctcaaggacacaggagatgaaagcattaaatatcccatttattttagaatatgcatttgtttgatctatattatgcagaagtctcagaaaaacaatactgactgccaccaccagttattactgaaaacagttgttgtttttttttctttttttttttgcatatgctacccccttgctccccctgcccacttttctctggttttactatatatattgttagagtatataaccattacataatacactttcttccttttaatccttatttagtattagttctatgaaactaaacttcatgctcatcaccagtccttatgacaatgtctttctagtcattttggttgtcggaggtttattctctagtagattcctcaggaagggctcatgggcataatattccctgagatcttgcatgctgataaagtttggttatgcatttgaagatcagtagagctaggtataaaaatctttggttcacgttttctttccttgagcatctcaaatatacattccatttccttcttgtgtagagtattgctgtcaaaaagtctgatgaggctgggcatgggggctcacaccttaatcctaccactttaagaagtagaggtgagaggattgcttgagcccaagaacttgagaccagcctgggcaacatagtgagactctatctctgcagaaataaaagaataaaacaatattgtctggatgcggtggctcacgcctgtaatcccagcactttgggatgccaaggcaggcggatcgcctgaggtcagagttgaagacaagcctggccaacatggcaaaaccccatctctactaaaaataaaaaaaattagctgggcgcagtggcgggtacctgtaattccagctactcaggaggctgaggcaggagaatcgcttgatcctgggaggcagaggttgcagtgaggcaagatcaccctactgcactctagcctgggcaacaaagtgagactctgtctcaaaaaataaaataaggtcccttccaagattgccggattgaaacagctcccagtgagattgatgcagaagatgggtgatttctgcatttcaaactgaggtacctgattcatctcattgggactggttggagagtgggtgcagcacatggaaggcaagccgaagcagggtagggcatcgcctcacctgggaagtacaaggggttgggggatttcccttttctagccaagggaagccatgagtgactgtacctggaggaatggtacgcttctgcccaaatactgcacttttcccacagtctttgcaaccagcagaccaggagattccctaccgtgcctgacttggcaggtcccacacccacggagccttgttcgctgctagcgcagcagtctgagatcgactgggatgctgaagcttggcagggggaggggcattcacctttgctaaggcttaagtaggtggttccatgctcacagtgtaaacaaaggagcagggaagctcgaacagagcagagcctgctgccactcaacaaggcctaatgcctgtctagattccacatatgggggcagggcatatctgaacaaaaggcagcagacagcttctgcagacttaaacatccctgcctgacagctctgaagaaagcagtggttctcccagcatggcatttgagctccaataatggacagactgcctcctcaagtgggtcccggacccccatgtagcctgactgggagacatttcccagtaggtgctgacagacaccccatacaggtgggtgcccctctgggacaaagcttccagaggaaggatcaggcagcaatatgtgctattctgcagcctccgctgctgatacccaggcaaacagggtctggagtggacctccagcaaactccaacagatctgcagctgaggggcctgtctgttagaagggaaactaacaaacagaaaggaatagcatcaacatcaacaaaaaagacatccacaccaaaaccccatccataggtcaccaacatcaaagaccaaaggtagataaaaccacaaagatggggagaaacaagagcagaaaggctgaaaattccaaacaccagaacacctcttctcctccaaaggaacacaactcctcgccagcaagggaccaaactggacgaagaatgagtttgatgaactcattctgtttgatgaacagaagtaggcttcagaaggtcggtaataacaaacttctctgagctaaaggagcatgttctaacccattgcaaggaagtaaaaaccttgagaaaaggttagacgaagggctaactagaataaccagtgtagagaagagcttaaatgacctgatggagctgaaaaccacagtacgagaacttcgtgaagcatacacaagcttcaatagccaattcaatcaaacagaagaaaggatatcagtgattgaagatcaaattaatgaaataaagtgagaagacaagttagagaaaaaagagggaaaagaaacaaacaaagcctccaagaaatatgggacaatgtgaaaagaccaaatctacatttgattggcatacctgaaagtgacggggagaatggaaccaaattagaaaacacccttgaggatattatccaggagaacttccccaacctagcaaggcaggccaacattcaaattcaggaaatacagagaccaccacaaagatactccttgagaagagcaaccccaagacacagaattgtcagattcaccaacgttgaaatgaaggaaaaaatgttaagggcagccagacagaaaggtccagctacccacaaagggaagccaatcaggctatcaggggatctcttggcagaaaccctacaagccagaagatagtgggggccaatattcaacattcttaaagaaaagaattttcaaccgagaatttcatatccagcccaactaagcttcataagtgaaggagaaataaaatcctttacagacaagcaaatgctgagagatactgtcaccaccaggcctgccttataagagctcctgaaggaagcactaaatatggaaaggtacagtcagtatcagccactgcaaaaacatgccaaattgtaaagaccatcaacgctatgaagaaactgcatcaattaatgggcgaaataaccagctagcatcataatgacagaatcaaattcacacacagcaatattaaccttaaatgtaaatgggctaaatgccccaattaaaagacacagactggcaaattggataaagagtaaagacccatcagtgtgctgtattcaggagacccatctcatgtacaaagacacacataggctcaaaataaagggatggaggaagatctaccaagcaaatggaaagaaaaaagaaagcaggggttgcaatcctggtctctgataaaacagactttaaaccaacaaagataaaaagagagaaagaaggccattacataatggtaaagggatcaattcaacaagaagagctaactatcctaaatatatatgcacccaatacagaagcactcagattcataaagcaagtccttagagacctacaaagagacttagactcccacacaataatggaaactttaacatcccactgttaatattaaacagatcaacgagacagaaaattaacaagaatatccaggacttgaactcagctctggatcaagcagacctaatagacatctacagaactctccacacctaatcaacagaatatacattcttctcaccaccacatcgcacttattctaaaactgaccacataattggaagtaaaattctcctcagcaaatgtaaaagaacagaaatcacaacaaatgtctctcagaccacagtgcaatcaaattagaactcaggattaagaaactcactcaaaaccgcacaactacatggaaaccgaacaacctgctcctgaatgactactggataaataacgaaatgaaggcagaaataaaaatgttctttgaaaccagtgagagcaaagacacaacataccagaatctctgggacacatttaaagcagtgtgtagagggaaatttatagcactaaatgctcacaagagaaagcaggaaagatctaaaatcgacaccctaacaacacagttaaaagaactagagaagcaagagcaaacaaattcaaaagctagcagaagacaagaaataactaagatcagagcagaactgaaggagacagagacacaaaaaacccttcaaaaaaatcaacgaatccaggagctggttttttgaaaagatcaacaaaatacatagactgctagcaagactaataaagaagaaaagagagaagactccaatagacacaataaaaaatgataaaggggatgtcaccacagatcccacagaaatacaaactaccatcagagaatactataaacacctctacacaaataaactagaaaatctagaagaaatggataaatttctggacacatacaccctcccaagactaaaccaggaaaaaattgaatctctgaatagaccaataacgagttgatgggggcagcaaaccaacatggcacatgtatacctatgtaacaaacctgcacgttgtgcacatgtaccctagaacttaaagtataataataataatgatttttagaaaacaaaaataaataaaacaatattaaaattagctggatgtggtggtttgcacctgtagtcccggctactcaggatgtccctgtcccctcacacacacccaaaaaagaaaatacagaaagaaaagtgatggtaatataactttctttgtagagacagggtttctctctgttgccaggctggagtgcagaggcacattcacagctcactgcaaccttgatctcctccactcaagcaatcctcccaccacagctttctgagtagtgggactacaggtgcgtgccatcacattcagctattttttgtatttttttttctattttgaccatccatgtcagaatttttttttttttttttttgtatttttggtagaaatagggtctttctgtgttgcccaggctagttttgaactcctgggctcaagcggtccacctgcctcggcctcccaaagtgctgagattacaggcataagccactgcacctggccagggctatatttctaataatagttttgtatgggatttgatcttaatacttttactgtgctgatttttacgtgaaataaattttcctgaattttcagaaggaggcttcatcagagagtttttctaacttcacagatctcttccttttattgttttcatgaagtgtgaaaatgacagtggctttggtttgagctttttctggctctgttcctctctcccccttttatctggatctctctcccccacttttcttgtctctgtgctgcttaattttgatcctgctcttagtggtttatccccagtgtgggttcagtaccgtaagggagtcctggcaggtcagtgctgagagctcaggggacaagaacttctccaggccctttagacttgaataagggcattggtgcccttgccctcgcctgctattgtgatggctgtttcagcagctgtgtgccgcccaaaaaatgcccatcacactttccagggaacacctgttggccacatctcaagtcatacaaatcagaggcaaactgaagtgtgtatacccccgcattcatcagtcattggttaaaggtgcccctggggaatggggaagtcccaggcatttccagagtgatgcagacaaattggtcctggcagtctgagggcactcctgtgactaaaagattccttcattcacatggtcaagaatggctcattttttgtacagcagagtgactatatttaataatactgtattgcatacttgaaatctgcttagagagtagatcttaagggttctcacatgagaaaaggtaacaatgtgaggtgatggatgtgttaatttgattgtagtaatcatttaacaatatgtatatatatcaaatcatcatattgtacactttaagtatatacaattttattggttaatgatacctcagtaaagctcaaaaatggctcatttttacatttccatttggcattgcattcagggtcatggaacctggaaaacagaggagtgagagggtacccccattccttccagtagcacattttgggagtggcacaccacactcttgctcacatccgttggccagaacttagtcacaagaagccactcagctgcaagggagattgggaaatgtagtttttagctgggaagctgcatgctcagctaaattctattataagggaagaaggggaaaatagatactggggaacaactggcagtctctttcactaagagtgatgggaaagagtgaaaggaaaagacttgtgaggtagggcaaaaggctcccacttccaggcagggggttgaggaggaggaggctgtatgctgaggtgaagccatacagccttcattgtggtaagggacaggtaagtctgaaggcagagaagacagagactgggtgacatgagggttggggaaaatggaacaaaacagaggccaggtgccttctagctatggttggccacatgactacgttctggccaatgggataggagcacaagaagcaatgcagcttcctcgacaaacttgtcttcttcttttttttctttttttttcttcttttgagatggagtctcgctctgtcacccaggctgcagtacagcagtgcaatctcggctcactgcaacctccgcctccctggttcaagcaattctcctgcctcagcctcctgagtagctgggattacaggtgtgcaccaccacgcccggctaatttttgtatttttagtagagacaggctttcaccatgttggtcagactggtctcaaactcctgacctcatgatctgcccaccttggcctcccaaagtgctggaattacaggcatgagtcaccgcacctggactccttttttttttttctttgatttccaatttttatgttcaggggtacatgtacaggatgtgcaggtttgttacatgggtaaatgtgtgccttggtggtctgctgcacaaatcatcccatcatgtaggtattcagcccagcatccattagctattcttcctgatacgctccttcctcccccacttctttgttctgttttgttttgttctgagatgcggttttgctctgttgcccaggctgggtgcggtggggcaatcccaactcactgcagccctgacctcccaggctcaggtgatcctcccacctcagcctcccaagtagctgtgactacaggcacacaccaccataccaggctaatttattttttgttttggtagaaacaggatcttgctaggttgcccagactggtctcaaattcctgggcccaagtggtccccccgtctcagcctcccaaagtgctgagattacagatgtgggccaggaacctgaccttcaccacaccacactcttaaatggcaaaatgcttgccctctacttccttatttctcatctctgtggcctggaatatgaatgtggggtaatgaacattcttttttttttttttttttttttttttgagacagagtctctctctgtcacccaggctggagagcagtggcatgaactcagctcactgcaaactccgcctcccgggttcaagcgattcttctgcctcagcctcctgagtagctgggactacaggcaagcctcactccgctcggctaatttttgtatttttagtagagacagcatttcaccatattggccaggctggtctcaaactcctgacctcgtgatccacccgcctcagcctcccaaagtgctgggattacaagagtgagccaccatgccaggcccggtaatgtacattcttaaaccatgtggatgggtgcacaatcttggaataacaagacaagacggtgcttgggctccttgtagatcagaggcaccctaccccccagctgccagcttggacccttacatgagagagaaataaatatctatagtatttaagttactgttatttggtctctattaaggcaggtgcaccaatattttaactaatatgttcacttgttgactgatcaattcaataacctaagagccaccatgtgccagcaccacatcagataccaggagccacaaagacacaagtccacaggggcctggtgaatcagggagctgaccgtgtctgaaccaggtcagaactgtttctccctgaatccatgcttctttcaggacttgagcttctgcaccagcagcacaggcctcttgagactgttggaccctagaaaaagttttggattcagactgggaacaggggcactggtgtggaggggatgtgcacagagcttcccgggactggagcccagggcccctcacagtattttatttaaggcttcacaacacacaccagcatttggtttatatttggtttttaaaaattctttggttgttctttaagacattaaatagaaataccctggccgggcgcggtggctcacgcctgtaatcccagcactttgggaggccaaggcgggcagatctcctgaggttgggagtttgagaccatcctgaccaacatagagaaacctcatctctactaaatatacaaaattagctgggcgtgtttgcacatgcctgtaatcccagctactcaggaggctgaggcaggagaatcatttgggccctggaggcagaggttgcggtgagccaagatggcgccattgcactccagcctgggcagcaagagcaaaactctgtctcaaaaagaaaaaagaaagaaagaaaacgaaataccccataaaacattcaaactatattggaaatatataaaataccggagaagcccttgttttgatataagtaggtctgagtcattgaccagtcttttggaaacgtcagttcaagtgggcaatcgttaaaaacagacacgtgtaggtcctggtcactttgttttgacttcaaacaaaattcacactcaggcactagtttttctttgggtatcttgactcaaatccctctttgactttcttgcataaatcacacccacaatcctataattcatcacctattattttcaatttatttaaacttaaagacagttgtgaagcaatctgatgtagaacagttctagatttttaggattttccctgaatagtttatctttcacatctaattcaacatgtcagcaaatctttttgtgtattacttccaaagcatttaacgtcatttgcaaggaaacaattctttatgcactcacatttcatcagtttatgtaatatttaatttaattatatgattacaatgacagtacacctggcataaacaggctagggacacacccaatcaactcttggtaaaccgacaactcaacccagagcagaggtagctgagttcttgcttttctagaccaggggtcagcaaactatggccctgtgggcctgtttttatacatcctgtgggttaaaaatgccttttaggggctgggtgtggtgactcacacctgtaatccgagcactttgggaagccaaggcaggcagatcacttgaggtcaggagttcgaggccagcctggccaacatggtgaaaccccatctccacaaaaaatacaaaaagtagccgggcatggtggcgggcgcccgtagtcccagctacttaggaggttgagacaggagaatcccttgaacccgggaagggggacttgcagtgagctgagatcacaccactgtactccagcctgggtgacagagtgagactgtctcaaaaaaaaaaaaaaaatgccttttatgccaggcacagtggctcatggctataatctcagcattttaggtggctgaggccagaggatcccttgagctcaataataataaaaagaatggctttttaaagtggttgaatctgtaagtggttgaaaaaaacttaaaaaaatatttattccatgaaaattatatgaaattcaaactttaatgtctgtaagcaaagatttactaaagcactactacatccattcttttttttttttttttttggtgtattcagtggctgctttcaagctaccatggctaagcctaacagtgtcaacagagactgtctggagcacaaagcctaaaatatttactatctggtcctttacagaaagagtttgcctacctctgttctagagcgaagcctgagccttgggtgctcactatgccacaggtatctgttactgtggtttgcagaagcttcaggtgagagggagagcttctaggagaatgcctaccacgaaaagtgaaaatcccttccttcttggcatcactgtttcccaaacccacctcccactcttcccaaggtagcttcatggtttgcttcgtcacttccttcctgggctcaagtgaacctcccaacttggtctaccagagcactgggattacagacatgagccactatacccagctctgatttttctctatagcacttatcagatatattccatgcttatttatttatttatttttaatttgtttgagacagagtctcactttgtcacccaggctggtgtgcagtggcaccatctcagctcactgcaacctccgccccccaggttcaagcaattctcctgcctcagcctcccaagtagctgggatcacaggcgtgtgccaccacacttggctaatttttgtacttttaatagagacgagatttcaccatgttggccaggctggtcttgaactcctgacctcaggtgatccacctgcctcagcctcccaaagtgctgggattacaggcatgagccaccacgcccagcctccatgcttattgatttattttctatttcctgtcactagaatgtgagctctatgagggcaagggttttgcctgtttgttcactgccctatcccagtccctagatgagtgcctggcacacagcagggacttcataaacgcttgttgaatgaggatcgaattactcttgctgtatgaccatctgctgtctgcaggaccctgggcatgaggaaatgcctgcaggcggaagggcagtgggccagtgctgcacagtgcacgatgatcaaagagagggcttatgtgtggggagtgggtacgggcaggtgggtgatggggtgcaaaattctagacctctaaggatgaatggcagaggccacacccccttgatgagtgacccttgagcccaccggacaaggggaatggttggctagggtccaggtccatggtctccctgacttagggtggccttgcccggggctctgagaatggggccaaggaagccctagtgattctgtcccctacccttcaaggacaagttggaggcaggccctggtctcaaacatctacaaaaacaattgtgtctgaactttctgccctcacagatgtcagccccccaacccccagacatgtctcatgaccactgagtcatgcatcaatgatgggtgtgggtgtgtggatggatgtagccaagcccattgaccgaggactgagacatactccccactaatcaacaagttaacaagctctctgatgaggaggcagtgattaatgaaccaatcggcttgccctgtaagtggggagtgaaattggagggtgggagtatgatggatagggagggcttggagggatgtgtgaggctggctcctggtccacactgagactatctgggtgcccatttactttggctataaatgaggaagtgacttcttcagaggttgtagcccaaattcaggccatcccataccctttagcttctataatgtctctcctgtcttcccatctgtccttggaccccatattccccaagacatgacggggttccagggatgtcagattccctgtggacatctcacaggctccatctctctgcctggaatcagtgcactagaaactccctatccccccatggttagtgctgcagggtcagaagagcaaacaggcccctactctctggtatccttgcccccattagcctgcagggtccttctgtaggccctgacccctgggatcacagatgtactaacaggctcccactgccccctccatcccagggtgagcacctgtcttttgtctttccatggaggagtggaattctttgatttctgctgtcacccctccaaacaggacaacagctgtctctctgtttgtctctctgtatctgtgttctgagaacgcctcagactgaggatcccccatgatacagccatgtcctttctttgagactggagttcttgaaggacagggccgtgccttgccccctggatgaggggtccctaagaagaatgatttttctccttccttcaaaggtaggatctatgtccccttgtcctggtgtcctcttccacctccatgctcagcagggcaccctggtgtttcctgggatgtgtggtcccatggggcctgactggctgataaggagccatctgcggagaatgcaggtgattgaacccataaaagagtgactgagagtttcctggggctgctgtaacaaatgaccacaaaggattctcacatgtttaagagcttgttgctctccctctccctctccctctccctctccctctccgtctccctctccgtctccctctccgtctccccacggtctccctctcatgcggggccgaagctggactgtactgctgccatctcggctcactgcaacctccctgcctgattctcctgcctcagcctgccgagtgcctgcgattgcaggcacgcgccgccacgcctgactggttttggtggagacggggtttcgctgtgttggccgggccggtctccagcccctaaccgcgagtgatccgccaacctcggcctcccgaggtgccgggattgcagacggagtctcgttcactcagtgctcaatggtgcccaggctggagtgcagtggcgtgatctcggctcactacaacctacacctcccagccgcctgccttggcctcccaaagtgccgagattgcagcctctgcccggccgccaccccgtctgggaagtgaggagtgtctctgcctggccgcccatcgtctgggatgtgaggagcccctctgcctggctgcccagtctggaaagtgaggagcatctccgcccggccgccatcccatctaggaagtgaggagcgcctcttcccagccgccgtcacatctaggaagtgaggagcgtctctgccccgccgcccattgtctgagatgtggggagcgcctctgccccgccgccccatctgggatgtgaggagcgcctctgcccggccgagaccccgtctgggaggtgacgagcgtctctgcccggccgccccgtctgagaagtgaggagaccctctgcctggcaaccaccccgtctgagaagtgaggagcccctccgcccggcagctgccccgtctgagaagtgaggagcctctccgcccggcagccaccccatctgggaagtgaggagcgtctccgcccagcagccaccccgtccgggagggaggtgggggggggtcagccccccgcccggccagccgccccgtctgggaggtgaggggcgcctctgcccggccgcccctactgggaagtgaggagcccctctgcccggccagccgccccgtccgggagggaggtgggggggtcagccccccgcccggccagccgccctgtccgggagggaggtgggggggtcagccctccgcccggccagccgccccgtctgggaggtgaggggcgcctctgcccggctgcccctactgggaagtgaggagcccctctgcccggccagccgccccatccgggagggaggtgggggggtccgccccccgcccggccagccgccccttccgggagggaggtgggggggtcggccccccgcctggccagccgccccgcccgggagggaggtgggggtgtcggccccccgcccggccagccgctccgtccaggagggaggtgggggggtcagccccccgcccggccagccgccccgtccgggagggagttgggggcggtcagcccccctgcccggccagccgccccgtccgggaggtgaggggcgcctctgcccggccgcccctactgggaagtgaggagcccctctgcccggccagccgccccatccgggagggaggtgggggcgtcagccccccgcccggccagccgccccgtccgggagggaggtgggggggtcagcccccctgcccggccagccgccccatccgggaggtgaggggcgcctctgcccggccgcccctactgggaagtgaggagcccctctgcccggccaccaccccgtctgggaggtgtgcccaacagctcattgagaacgggccaggatgacaatggcggctttgtggaatggaaaggcgggaaaggtggggaaaagattgagaaatcggatggttgccctgtctgtgtagaaagaagtagacatgggagacttttcattttgttctgcactaagaaaaattcctctgccttgggatcctgttgatctgtgaccttacccccaaccctgtgctctctgaaacatgtgctgtgtccactcagggttaaaaggattaagggtggtgcaagatgtgctttgttaaacagatgcttgaaggcagcatgctcgttaagagtcatcaccactccctaatctcaagtaatcagggacacaaacactgcggaaggccgcagggtcctctgcctaggaaaaccagagacctttgttcacttgtttatctgctgaccttccctccactattgtcccatgaccctgccaaatccccctctgtgagaaacacccaagaattatcaataaaaaaataaatttaaaaaaaaaaaaaaaaaagagtgactgagagagccctgaactctccctctcaggagagctctaaaaatagcacccacagccatctgtcctggggctggaggggctggctcagaaccagcggcctggacaagttggccccttcagcccccatgggttgatgggacatctggaagtactggaggtctggccaggccagggagaggaagctggaagggctttatggagagaccttcccacagccctctctcctactgggcaggtgggtttgagggggttggcattctggaggcccttcccctactcagcctctcatagtgggtggtgggccccagacttaggcttccggtccctgctcccaggcctgcctccggcaccacatggctactccaggtgctgaggctttctgcccctcacaattgagaggtcctcttcctggggtctgcctcaccctccttttcctgtttgaatcatgggtgactttggctgcttcatcagggcttcaatttcctcatctggaaaatggagataaactcagctcattgttttgtgatgtccgaaattatgtactacccggtgcacagtaggtgcttaataaacatgagtcctttccttcaaaggatctgggcttcagagcccagtggagactgccatgggctggggacagtggcatgtgcttgggaaggcttggcatcactcaggcccagaagacaccagtgccctgattgacacctgcataggggtggggacattgcctggggagagggctctatgccacacatggctggaccagggtctttgtgtgccaggctggatacacaggtagctgactcagctgcttctggttgggggactggcttctgcctcctcctgcctcttttcccaactctttaatggagagagaacataacggagtgttcagagaggcctctcccccaggatatcataaactgcaggccaggagcccaaggtcaggtgctcccacccctgcctccaggagaaagactttcccccagaggtcctgtcactcctcagcccttctccaaggtattactgagcagaggctgaaaagagttgtgttttggaaagagtggtcacagatcccacaggctggaagaaatgtgtctaccctcccaccccccactcccaccatggactggctagggaagacagaatctcattcctggtcctaggggctgccccaggagtctaatccaaccacttcacttcctcaggaggctggacctgcccctgcggggctgtgggctgaacacagggttcaggctaggtaccccatccagtgggaccccaaatctgagcatggcagctgccccctgagctcctatgaggtggagacgtcacacagtggctgagcgtaagctcaaggatctggtgcgggtggaaggaggaagaagggcgcaccccctgctggctccccctccccgtgggactccctttcctttccaggcggggatataagccccgaaaggaaagccctgagcagaggaggcctcagcttgacctgtcccagtgcgcccttgaaactttcctcgccttccacctcctgctcatctgcttcacaagctgtcgctgtgagtggctggagctcaagcatggtctggtactaggaaatccaggctgttttgtggggaaactgaggctgggatggtggaagctgggggtgagtggtgggaaactggattggagggggccattggaggtgggaaggaggcccgggagtcccgttgccagcacaaccctctttaatctacctctctggacagcagcgggggtgggggtggggttacgtcaggcagggcttatgtccctctgacagattaggaaactgaggcaggagacggtgcagtgccggagaacatatggcaagctggtggctgaaccttggtccgctaccagccccagggagagcaccggagcacggccccgacggcagccgcagcctcccgccgtggagggtcgaggctcggaatgacccacaccccaatgtcgccttcccaggtggtgtcggttcgcaggtcgtggcctctcatggccacggtgcttttggccctgctcgtctacctgggggcgctggtcgacgcctaccccatcaaacccgaggctcccggcgaagacgccttcctggggtagctgagccgctgctacgcctatcctcgccactacctcatcctggtcactcagccgtcgtgagcgcaggcgcggggcgggcggagcgggacccctggggctctccccctgcggccccgctccaccgggggcgtggctagatctgaccgcgcccttccaggccccgccctcaggtatgggaaactaggccgcccggtcgcgcgcctctccaaaacgttcttcccagactgcgaggaccgcctcggcaggtggcggtaaaagcgcccccatcaagtcacataacatcctgcctccgagagcgcggtctggccccaccctggtccatcacttacgacgtctcccaggcttgcctccccggatcggattcctttcccttcgatcccgcaggccggaggcgcagacctgtggtgaggacacccgaggcctcctgggagacctgcagaccacgcccacctcatttacatgttcactcccgaccctggaaacccggatttcgcctccggacagcggcgtctgggcagggttcgggtactgcagtcccgcgtctggatgcccccgccccctgagctgcagggctgtgtgtggtccttccctggtcccaaaataaagagcgaattgcacagaaacggaatgtgtgcctttgtattttctttcctttctccttcgtggaggtggcgtctcgtggaagtggagggtggaggcgtgggggccagaggagagaaaacctactcggacagaggcgctccaggacaaggctggggcgagcgcgggggttccctctgctcggagcccaaggaaaattcgaccacccagcctggggctggacagcgcccagaccaggggctgctgtggaaggaactctagttgagtgggggcaggggtggatgggtttctggaaaaaggggcagggagcgtggacaggagccgcgggagaggcaggtaatttctaccgtccccctttccccgagcagaggagcaatggggagtgtggaggctgcccgatcgctaaaaaaccgccctctctcatctcgctgaatccacactcagtggataagtcaggaattgtgctttcctagtgacaaggccatagggacaccctcccatgtacccccctcccctggactagatactgaagcctaagggcgctgtggatgtttaaactcaccattctgcaccgattccagagcctgcctgtagggtgatctcccctgacatgcaccctttcctgcccctttcctccaagaagcttgccttgattgcctaattgcactcttcctgccctctctggctgcccagctctcagggcctctgctctattcactgagacttctgtctgtgtctttgtgtcttgtctccctcctggggcctcaggaaggaaaggcctatgtctccttcctcagcctcctgtatctatgggatgtctccagatgcagcctcctgtatctatgggatgtctcctgggcctctagttcagcaagacctgcccaaatcttgcagggggctaggagatgagggggagaatcagggttgaggccaaagcctttgacccagagagggtgaaaaggacaggaagactgcaggcatccctgtgtggatcagggttttgaagtactgtttgcagttccatggctctggaagaagagaagactctaaagctaactctgccatagctgcagaggaggtccctgcttggacacaggtccccagggggccacagggctctgacacccaccctcccctgtgctgccctccagcctccctggaggtagagctgaaagggtgaagctgaagaggcagctgtaggtcactggctatgtggattctgatgctctgtgcctttgcccaggccactgtccctgcttgcagagagccctttccctctcttcagcctggaagatactctcaggatagtggtcacctcctcccggaagccttgcctgatttcctggggatggagttagtttctctggctccctctccccactcattatcttagacccactttccatcccattttgctgcctgtcttctctcctgcgataggacaggtgggatgggagcatacagtggctacccggagcttcagctcactgtgtgggtggggagtgggaggatgtgtctgtgcgctggtgtctgtgatcccttatctattggtctgcctgggagagctgtagtcagtttaaggtggatggaagagagacctggtatgaattaggcatgaccacagacaatttttgcccagcttgtcatgtctcattgaccatcagtgacatgggtccacctcatgttcattttgaagagtgttgagcagtttagggtaataatattattaataactattattagtataataattaatataatagcaataattaccttttccaaaaagcacttatttatgtgctagactctgagctgttcgttttacatatatgatattactaggatattgatttggcttaaaaaaacagatagaattaacagtgacttaaacagaaaggaaatttatttctcttacctgaaatgcaagtgacatctggggagctggcctctctgctccacgagggcatccaaaagcccaggctcctcatttgtggcttccccatgccctcatctatgtcattgacaggactgaagacagcctgccatgacctcatctgtgttccagccagtggcaagtgggggaagggagagggtaggtgctctggttactatgttgtataataagttaccctaaaacttggcagcctcaaacaaccattgtatgtcactcatgatgttgtgggtcaggaccaggaagcgctcacctcagcagttctcgctttgagtctcacatgcggataccatcagaggctggcagatctgcagttatctaaatgatccaccgggctgatgcctgaggagtctcactcccatgctggtgccggctgttgagttcagccggggctgttgactgtcgtacctacaaatgggctctccagcacgatattcttggggtagttggacttacattgtagctggcttcccgcttatttccagagaattggatgaagatggcattgctatttagtttgctagggctgctgtagcaggacgagtcgcagacaaaactcctgagacaccggattaaagaaggaagaggttttttattcggccgggagcatcagcagactcgcatcttaagagccgagctccccgaaaaagaaattcctagccctttgaagggcttacaactctaaggggtctacgtgaaagagtcataatagatcaagtaagtgtgaggaatgtgactgtgggctacctacatcagctaacactacaaaaagttttacagtgctttctcacacaatgtctggaatttacagataacaccagtagttttggtcaggggttaatattattatcattttaaccaccagggccaggtggtggcgccaaggtcgtctagctatttatctttcttctgtttctttccaactttttgctttctcccttttctcctgtcttataaactagggaaaaggggaggttggggagaaactgggaaggacaacaggagaagtggtggtctcgtaccatattccccccctttgagaattttcactttttagtgggagttctcactctcatcctcactttctgagtctctttgcgagatagagcgatagtgattcatataatacacgtgtgctgaagttttttgatgaaccaaagtagcaacaaaacattttatcatttgaaaaagcaagggtaatacacaggggagcagcaagcaagttcctattactagcactacacctacaatgagggtttttaatcctcctgtagctggaaaccattttccaaagaaagactcaggatcaaactcgtgccaaacctgtacagacacatgtgccacctttgtcatgtccctgactatgttttcaaccacctgtccttgatcatctatttgtaggcagcaactggttaagttaaatttttcacaaactcctccttcagctgctagcaagtagtccaaggccagcctattctgagagatagcattcctcatttgggtttcctgccaagctaaaacagtcaaagtttcattagtaattatttctaagatggcctgcaaccatatgatctgattgagcatgtagatggggattcagtatccccatgagctgtcttgtgcccatgcggcaggcccataatactgtatgatcctttcagggggccactcattatctttccagtttcctataactatgcctctcttgggaggcatagacagggaaacctaggagctcacccgtttttatgggtaataagaaaaaggacggcttaatagtgccaataacacaactgcctgcccatttattaggtaaccgaatgtaggctccgtgcccacatatccagtatagtccagcgggagctgcccagtcctgatgagattctggatgagcccaggcagtttttaatttagaaaatttactaaatgggttcttttcagtgtggtttaggccccaccaagtaattgtctttgttgtgctgttgtacaacttctgtcctatacaattaagctttcttacagggatgataaagactttcccttctctagctatacagtattgtccaataattgaggtttttaggacccagaagttgctagcttgggccttctgaactggaattacatcaggagctggatcagtaggcaccaactctcgggcttcccaaggccatcggtctccgatagtggttcccccgcatacataacaagaagtaacattaagggaatgagctacattttctgctgattggataaacaaattttttgtctttttcggaagttctggtgctggcagattcagctcctcataaaaggtttgaaatactggcttgggagagcgcttgtggacctcccctctaattaaaatggcaacttgggggtttaaccccgtcccatcgatccccagggttacacgttctccctttttctaatggggatctaggggattggtaattattagttctagtgggttacagtgaccggcagcacaggaagggttggcttcccccttctgaagatgaaccgggtcttttttgttctttttccaagtagcccaaataacacatggccaaaaggcacaattttcacaatcccctgactcatgacaaacatatttattttctactctgtagctcctttcccagttaagagaaccacattctgttcctagtttgttactattaatggctgcacaagcatcaaatcttaaaattatttgtttggggattcctttttcttctgttctagttattattttacttgtgtcacctaggaaaaggctagttcttaatcttgtttcaaaaatggtggttgcagggggctcagatgggttataacacacatcaggtgggtcatttcccaggctacataccttgtactgagtggcattatacaaacaagtttcttttaacattcccatatattcataataactatagaacagaaagattgttttaatttgctgtcctacctcagtgacctgatgaatacactgggaacagtccccagtttgagtaaggtcagttgaagcccttactgtgtaagtccagaatttaagaaaaatgaatcccacgatgagcttcctcatgcttcggccgtgcgtggaccagtcagcttctgggtgtgactggagcagggcttgtcgtcttcctcagggtcactctgcaagggtcgtctgggcttggtcttgcctcccaggtttcaggtgctgcaggttttacacggctgtggtggatccaggctgggattccctctaccttcacagcggtgggagtggtcaggacgacagactacggtctttccaccgtgggcacaaagaagttacgttccagtccttgatccacactcgattacctggggagaaagggtgaactggggagaataagctaacagggcatctctcatttacccaggctgagattgtttgtgtaatttttcctaaagcctgtagttgtcgctgtaactcaatttcacctaactctcggggagtgcctggaagtccctgcaatatgggagggggcctatgatacaatatttcataaggggaatatcctgttcttttagaaggggtacatctaattttaaataataccatagggagagcctgtatccattttaatcctgtttcctgacatactttccctaagctatttttgatagtccaattcatcgactccacctttctggaactctgaggccggtaggcagcatgcagtttccatgtgttccccaatacctttgccctcttctgtaccaagtcagccacaaatgctggcccattatctgagccgatccgtaagggcagtccaaatctaggaataggatctcgaagaagcacacaggttacttcacgagctttctcagtttgtgctggataagcctccacccaccagagtaggtacacacaagaactagtaaatacttgttacctccacactttggcatctctgtgaagtccacctggacatcttcaaagggggctgctccataagcttgtatgacgggcggaacagctggaccttgcttcgcattatgctttgggcaggtaacacaccgctgcgtcaccgttttggcaagggctgacaaatgcaagatgtagaaataccggactaacaacttttcaagtgactcctggcctagatgggtggttttatgcacagccagcacaactgcggctcctagcagctgtggcacagcttctctcccatctggtaaccgaatccatccttcctccatcacttgtcctccctctgcctggagaaagtccttttcttctttagaataagtaggtaaaagatcaggcgcttgagggagcaggggtgctgtgactgatgcccggaagggggcagatgctgcttttcgagcctctaagtcagcgcgggaattccgcaaacccaccaaggtggaagctcgctggtgtcctctgcaatgcataacggccaccttgtgtggtttccatactgcttctaataattgcaagatttcttgttgatattttatgtcctttcccccagagttcaataggcgcttttctttatataatgctccatgcacttgaagggttaaaaaggcataccgagagtcagtgtaaatgttgacagtcttaccttcactgagttctaaggcctgaatgaaagcaatgagttcagctttctgggctgaagtgccctggggcaacgatctggcttcaacaacagtgcccagggttaccaccgcacaccctgcaaatctctctccttgtgggttgatgaagctgctccaatccacgtatagttcccagtctactgatgcccaaggctggtcccagaggtcaggtctgctagagtaaactgagtccaatacttctacacaatcatgcttgacagggctctctgataccgggagcaaggtagtggggttcagggtgttacaaacttcagtggttatacggggattttcacagagcaaactttggtacttagtgagtctagcattcgctagctaatgatgtcctttagtattcgttaaagtcaccacagcatggggggcctttatgttcaggttttgcccaagagtcagcttatctgcttcttgtactagcagggcagttggtgccaaggccctcaaacatgggggccatcctttagcaaccccgtctagttgtttagagagataggccaccggcctcagccagggccccacagtttgggttaaaactccaactgccatcttttctctctctgacacatacaatgtaaaaggctttgtcagatcggatagccccagggctggggctgacataagtttttcctttaactcatgaaaggcttgctgttgctgggatccccattcaaaaggtcccggtcccccccactttgtgacctcacacaaaggcttagctaatactgcaaagtttgggatccacagtctgcaaaaccccgcagctcctaagaattctctcacctgccttctggtcttaggctctggcagattgcaaatgacctgctttcttcctgatcccaggctgcgctccccctgtcggatagtaaatcccaagtaatgtacgtgctgttggcagatctgagcttttttcttggacaccttatacccacagtcctccaggtgccggagtagtgtgtctgttcccttggcgcacccgactgccgtggggtgtcccagcaaaagatcaacatactggagcaacacacagcctaggtctctggtgggaaacttctggtggtctcgagccaacacctccccaaagatggtgggggagttcttgaacccttggggaacccgggtccaagtgtactgagtagtgacacctgactccggatcttcccactgaaaggcaaatagcttctggctctcaggggctaatctgatgctaaagaaagcgtctttcaggtccaagcaggtgaagcagctgtcctcagctggcagcaaccccaacaatgtgtacgggttaggtactgttggatgtaaagtcactgtagcttgattaaccaagcgcaaatcctgtaccggcctgtagtccttggtcccaggcttgggaacaggcaggaggagagtgttccgtggagactgacaaggaactttaattccaaaggttcttaggcacttgagatggacctggataccttcaagagcttctctggggaccgggtactgtttttgcctaaccagctggtccccaggcttaacttctataagtatgggggcttggttgactgccaaccctggagggttgtcttcaggccacactcttggccaccacttagccagagctggtcttatctcttggctcaactcagttaagaaaagtctccattcctcctctcgggggaccgtaagggtcataatgactcccgttctgggtaactttagcagcaaagagccatgctctgtaaaagagatagtggctctcagcttgctaagcaagtcccttcccaacaagggcaagggacagtcaggcatgtacaaaaactgatgaatcactttatgtcctcctacagtacaagtccggggcaagcagaaagcttgttttgctgaaactcccgtggctccgattatgtcaatagtctttttggataagggggcgaccggggcggttactaccgaatgttcagcaccggtatctacaagaaaatcaatgtctttacccccaactgtcatcctgaccataggctctttgggggcccttgagcccagtccccctcagtccaataacccttctgccaggttgagcagggccccttcctccttgtctggtgcctcctgctccaagtcaccttgttttccttttagctgagagcacttgttcttccaatgtcctatttctttacaataagcacactgattacgctgcaagctctgacagccaggctgagtttctttcccggggccccccttcccttgcctctttggggggtcccctctgattgctgcagctaacagatcagcgtttcgctgggcctgacgttcattctctttctggttttccttacggcttactgcatccctgtttacaaacacctggttagctatttctaataactgtgatgtgttcatccttgcaaacccagcctgtttctgcagttttcttctaatgtcttctgtgctttgaataactaaagccatgttaatcatgcactgattttcagggctatcgggatcaaagggagtatacatacgataggcctcacacagtctctcgtagaattgtgctggactttcttcttttctctgaatgacctcagagaccttgttaatgtttgtggccttctgggctcccctctttaatccttccaagagagcttccctgtatcggtttagcctttgcatatcctgtctttcatttgggtcccactgggggtaggttcccagtaactgggtccttacatcctcttgggggtttttgtaatcagtcggtgcatgttcctctagccacttagttgctgcttggagcactctccgcctttcatctgtgttaaagaggaacatgagcaactggtggcaatcagccctagtggggttatgggtctggataatagtttggagcaaatcaattagagcttgtggcttttcagtataggatggggtattgcttttccagttgagaaggtgggcagaggtgaagggctggtacccaaaaacacacctctccaccacgtgaccatcctcatctataccagtatactgctgctctctcaggggcatttgtatcccagttttgtgtcttaaacgagctgccaagggaggggtttctcccgaggcttcacctcctctcttgtctactgtgggtggcctaaggatatgtttgtcttgcggaggtacaagcactgtggaatcaaaagtggggagcccctctccctggtaaggggagggcaccactgggatcactggtgccatctcctgcaatgtatcttctgatgttgggttgaacagaactttaggagttggtttccctcagacggtggagcgggatccttccttggctatctgtccctttgctactagcactgctgctgcctgccctcttagccactgtgggggctctagcaccagctgtaaccaagtgtctatgcatgggaactggtctgagtgtcctgacttaccagttaccttgtgccataccttagaaacaagggacctgtccaggcttccttctgatggccaacccacttctaatgttggccaatctatttcacacaaagttctaagtttccctggtgtcatagtaaccccatagtgtccattaaatcccttcttaaaatttttcaacacagttcctagcggagtaggcttactttgtgtctgacccgtgtttcctcaagacaaaacaccaagcttacaccacacacacaccacagaacaaagaacaggtaaaaagggcacacacacactttttcagtttacaccaaaccagaatcaaaaccaaaatccgagtatccagaagtccaagccaggtcaaaaccaaaaccaaaatatcaagcaattcaagtcaagtcaaaaacaaaaaccaaagtgccggtacaggcacgccatgggtgatcaggccacgcttccactcagatggagtgggcaagttccaaagaccagtcttaccaagtttcaaatgtccggactccaagtgcccattccttcccggtgttcagccactgcgttgatcctccacaggggcctgccacgcactgctctgatgaggcgttccaccggggcaattgcctacccgggagtggtctcaggatctgcgtcactcaagctggccagagtcccccacagggatgctccacagggcaggcctaagccacctaaggggctgcctcgaccctccgtccatcaattacctcgcttcccaggcagggaaccaagaaatgtagcaggatgagtcgcagacaaaactcctcagacactggattaaagaaggaagaggtttttattcggccaggagcatcggcagagtcgcatcttaagagccgagctccccgaaaaagaaattcctagccctttgaagggcttacaactctaaggggtctacgtgaaagagtcatcacagatcaagtaagtgtgaggaacgtgactgggggctacctacatcagctaacagtacaaaaagttttacagtgctttctcatataatgtctggaatttacagataacaccagtagttttggtcaggggttaatattattatcattttaaccaccagggccaggtggtggcgccaaggtcgtctagctatttatcttacttctgtttctttccaactttttgctttctcccttttctcctgtcttataaactagggaaaaggggaggttggggagaaactgggaaggacaacaggagaagtggtggtctcctaccatactgccatagtaaagagtcacagactgggtgtttaaacgacagttctggaggctagcagtctgaaatgaaggtgttggcagggttgattccttctgatctgttccaggcctctctccttgccttgaagatgggtgtctgagctgtgtttcttcacatcatcttccctctatgcatgtctatttctgtgcccaaattaccctttttataagaccagtcctacgggattagggtctcacacactgtagtatgacctaatcttaactaattagatccacgatgattctctttctaaataaggtcacattcggaggcagcaggaattaagactgcatcatatgaatttggtggggggcggggacatgcaatttaacttataacaattgctttccgtgacccagcctcagaagtcacatggcatcctaccccatactctgttagtcaaagcagtcacaagtgcacacacattcaagaagaggggacatagaccccactgtagaatcacacatgagataggagatatttttgtggtcatctttgaaaaatataatctgccacaggcagacacatccattcctaaaaacagaatggcaaaaatcactttaactctcagcccactggttaaagcctagtctcatggccccacttagctgcaaggacaacctatgagacatctttagctgagtgtctgcgggcccatcgcaagctctttgtttttaaaaatatttttatttataaatggatttttttgttgttatataacaaacctacatatgtaccatctcaagctctttgatgatgaaaggagaatgtggatatttgggcacctagaattatctgctagaaacatgatatcctttggatgtcatttagaaatcattgggtcctatctcttcattgaaccaatgggaatcccaaggccaagagggagagaggcttgcaggaacccatagagtgagggacagaggtaagagttctcatcccaaagcagttctgtttctactaaacacgaaatctaaactatttcctggaaactccaggcatttcataacaccccttcctcctcctcctgcaattcctcagtgtgtgcccctaaagtgctcagccccactgccacagccccacttctgtgaaatagcatttccccctgccccaaccttcaaggccacttcaggcctcattccctccaggaaccttcctgccctgccctccctgttcacctccccaacactgtattttgtagcttggtgtagtctctatttcagcaagaaagaagccgtcctctttgagaacaatttggagtggcaatgataggatttgctgttgcggacactggagacaggaaaggagaaatatctaactctccctgtgtgtcttcaggaggccctggaggcacatggagtttccagggcagagagaagtggaggcagagcccaggctccaaattagtggagtgagcccccactgggtcctgagttggctcagagtgggtgagacaaggtgctcaaggtatgcgtgtgggtgtcacagctatccccagagcaaaggtttctctagggcataggtcctggcatctggggacagctaccccccaatttacccccgtcctctgctgctgccattcaattttggaataagacattggcctaagggctgggccaggctctggccagtggcagaggtcgggggcggaagggtggtgtctggaaacagggataaagccaggctggaaccatgcagaccggggtttagtcttgacgcttcctgactcccatgtgaccttagacaacctcagctacctcactgggccttggttttctcatctgataagagcaaagagtaattcctgcctccctcacaaggtagcaaagaggcatttgtaaaatgacctgtgaggaagtttctgaagtgcacccttaggtgagggacggctgccagcttgctggagggccacagccagcttcttccctttctgaactttcgtgtccttgctttcaaaaaaagccaccctggccagatgcagtggctcacggctgtaatcccagcactttgggaggccaaggtgggcagatcacctgaggtcaggagttcgaaaccagcctggccaaaatggcaaaaccctgtctctactaaaaatacaaaagttagccaggcatggtggcgggcgcctgtaatcccaggtactcgggaggctgagacaggagaatcactggaacccgggaggcagagtttacagtgagctgagattgtgccactgcactccagcctggttgacagagtgagactctatctcaaaaaagaaaaaaatcccaaaacaaaaaaccgtcttggctgggtgcagtggctccctcttgaattccagcactttgggatgccgaggcggatggatcacttgagcccatctctacacaaaattaaaaaaaaaatttggctggctgtggtgacacacacctgtggtcccagctacttgggaagctgagatgggaggatcccttgagccatgaggcagaggctatagtgaacatgatcatgccactgcactccagcctgggtgacagagtgagagcctgtctaaaaaaaaaaaaagcaagccatcccccggctcctcatacagcttgaacttccttgcagaacctttgcttcttcatctcctcccgctgcccccaccaggcccagaacagatgtgcaataaatgaccactcgttggtcattcactgaaagcagcagagattgcagttagacagctaagaccggggctgtgatggaggacacagtgcaggccaaactgctgccctggggtcacgtatgtggggaccccattccctttgctcctttacctgcctcgttcactctgtgacctcaggtgtttctggggtgttcctctcctagtctcatagcacttactccatccccatcactgccagtggccatcctccttgtgccagagggcatggtgttgggcaggggaagaggcaccactatcatcttcatttagtgcatctgcaggccgtgaattggtgatttcagatcagggctctgtggcaagcactatgggagttactgaaaaggggttctgattcagaccccaaaagagggttcttagagctcctgcaagaaagaattcagagtgagtccacagagtagagtgaaagtaagtttattagagaagaaaggaaacaagggccaggcgcggtggctcatgccagtaatcccagcaccttgggaggccgaggcaggaggatagtttgagcctgggcaaaaaactgagcccccatctctacaaaataaataaataaaagggaagtaaagaaacagaagagggccgggcacagtggcccatgcctataatcccagcactttgggaggccgaggtgggcggatcagctgaggtcaggagttcaaagccagcctgaccaacatagagaaaccccatctctactataaatacaaaattagccgggtgtggtggcacatgcctgtaaacccagctactcgggaggctgaggcaggagaattacttgaatccaggaggtagaggttgcagtcagccaggattgcaccactgcattccagcctgggctgcaagagcgaaactccatctcaaaaaaaaaaagaaagaaacaaaagaatggctactccataggcagagcagcccccatggctgctggttggctatttttacggttatgccttgatcatatactaataaacaaggggtgggttactcatgagttttccaggaaaagggtgcggatttcccagaactgagggtcccgtctccttttagaccatgtaaggtaacttccagatattgccatgatatttgtaaactgtctggcactggtgggagcatctcttagcatgctaatatattataattagcatataatgatcagtgagtccgggcgtgctcacacctgtaatcccagaactttgggaggtcgaggtgggcagatcacttgaggtcaggagttcaagaccagcctggccaacatggtgaaaccccatctctcctaaaaaaaaaaaaaaaaaaaaagaacagcaaggatgatcagaggtcactttcatcaccctcttgttttttgcatgtttgtaccagcttctttatctcattctgttttatcagcagggtcttgtgacctgtatcttgtgccaacctcctatctcatcctgtgactaaaaatgcctaacctcctgggaatgcagcccagcaggtctcagcctcattttacccagcccctgttcaagatggactcgctctggttcaaacgcctcagacaggaatacatgaagatgagcgagcattgctgtgttctagacatggtgacatggttaggctttgtgtccccacccaaatttcatcttgaattgcaattcccattgtccccatgtgtcaagggagagaccaggtggaggtcattgaatcatgggggcagttttccccatgctgttctcgtgatagtgagtgagttctcatgagatctgatgatattataagatgctattccccgctttgatcagcacttctccttcctgccaccttgtgaggagggtgccttgcttcccctacgccttctgcgatggctgtacatttccggaggcctccgcagccatgccaaactgtgagtcaattaaacctctttcctttataaaattacccaaactcaggtagttctttttgtttttcgttttgagatggaggcccaggctggggtgcagtggcacgctgtcagctcactgcaacctttgcctcccaggttcaagcaattctcctgcttcagccaccccagtagctgggactacaggtccgagccaccacatctggctaattgttgtatttttagtagagatggggtttcaccatgttggccaggctggtctcaaactcctgacctcaggtgatctgcccacctcagcctcccaaagtgctgggattacaggtgtgagccaccgcgcccagcctcaggcagttttctatagcagtatgaaaaacggactaatacacatggacatgcagtatagaaagcacatccactaccacttcctcctagattgtcaacacatctctgagaggacccagaagaggaatctgttgtttgcaaagaagaaaatgaaaggtgcagtttggctgacatttgtggagtacctgttatttcttagacacttaggtttatctctgcgacagaacagaactataagtggcccaggcatctgagtcaatccctagacccacgtctgtcaggtggggctgggtcccgacacgaatagcagccagaacaggtccctccaggccatggtcctgtggaagcttcaacccttttaactagggttggagcctggtgccccatgatggtgagctgcagcctctacccaccaaacccaaggccagcctgagaccagccaccagttcacaccttgttttgcaagtggaaaacctcagtccagagaaagacccaggtttgctgagacagaacaactttcatatttgccttgtggaatgtaagttgtctggtgaagcattattgctcttcttgttaccagaaatcaaaattgagaggatcggccgggcacagtggctcatgtctgtaatcccagcactttgggaggccgaggccggcagatcacttgaggtcaggagtttgagaccagcctggccaacatggtgaaaccccatctctaccaaaaatataaaaaattagtcgggtgtggtggcacgtgcctgtaatcccagctactcaggaggctgattgggagaattgctccaacccaggaggcggaggttgcagtgagccaagatcgtgccactgcactccagcctgggtgagagtgagacttcatctcaaaaaaagaaaagaaaaaaattgagaggatcaaggcagaacactgatgttcgctgagccttcctttattctccttaccttgagatggatgtgatgagctcattttacagagaggaaaagtgaaactcagggaggctaaagaaattactttcccaggctcatgcaaccagccaatggcggagccaggatttggacccaggtctatctgactctaagctcaccctgccagatccatggagtttcacctctggccccctcttccccaacagtacccccaccaacttcttggtgtcctgatctgggacagcagaacgtcagcactgagaagtccttttctccctacttgggtgtcaccgtgtcattcagacacagttaccactccttggcctgagcaggggagggagacttggggttgggaagagacactgggcaggggaaacctgggggcttctggtggggatgggttagtggggttgagaatctaagccagaattggagacctaggtagctatgagatcttgaacaagcctctttacctctgtgagcctcaggtttctcagcaaaaaattgggaaattataccaatactttgacagtcccacttagaaaaaaaaacaatccaggtttggagttagactttggagttagattttgttccaaaccccggatctcccactgactagctgtgtggtctggagtcagttacttgacatttctgtgcagattttggaacctgaatctgtaaagtgggttgttgtggggatttagtgaggtgactgagctgggagcactttggaaaaggtgaggctttacaaatgatgctggtttttagcactccgctggaatgggggctctaggatggctaccagaaactggtaccccctcaacctttcccctgaacctaggcacattagttctcattctgcatcctatgcacccaccaaacggctttctccaaacctggcaccccacttctttccaccttgcctgaggacctgaagcctcttccctgttcccaccttgttctagttccaaactgcaaaggatggcctgagtttccattcttcatcctggaggctccagctgcagcctcaatcttctgccccgagagaatccatttgatttggtttgatccttgggagatgggagggccagctccaaggcctgtgaccaaaacctttcagtcaccctgaagtcccataaccccatctttcttgaaccaagcctgctctggtgcccaaaaggaaggggtctcagcaatgggggcccacaggagacttttgctgtgatccagttttattgactatgctgctagtctggcacccccagcactcccgtccccctcccatctctggcccagtagtggcgttgcgagtaccagggagacagtgggaggagggagtaagggctgcggagtgggagaggctgacaggagacggggactctaggggactgaggactgaaaaagcggcccagctgagggcagggacacgtccttgcttggtccagtgaccgtttactctggactctgggtaagtgggctcagcctgcttggggatctggagaactcccccaggctggggtctgggatggagggaaggagttcgtgctttgcagggccaggggccttcaaagccctaaggtcctgcttgggtattgctctgcatctggacacacctgtcacactaggagagccatcagatgactgcaagtgtgtgtgcacactcgtgtgcatggctgtgaactggaatgtgtccctgtgtgagtggctgtgccggtctgtgcaggatgtcttctccagaacccatatctgtctctactgttgggtggagggccagacccacaagaccatggatttctgtcctttgcttccccagttcattccatgtcccacaccctgtgggtgacctggtgtgcccttatttcccactagctactgctgcctcagagccatgaggacctggatgtcatgagacatgtgtctccaggactcatgtctccattttctctgctacacttctctaacttgcgaggccctggctgctgggctgctcacaggacaggctgtccgtgcctccagcacactgtctaggaggtggagtggtcagctcggagtggcccttttctctgccctctcgtccccaggcttggagaaatggatgatgggctaaacggctgggtagatgggccctgcttccggggcataggaaaatcttcagcatgggctcttccacctccacctccacctcccctctgctagctcctcagatggctgccgcatgccgctgcctctccctcctgctcctgtccacctgtgtggctctgttgctgtagccactgctgggtgcccggggagccccgttggagccattgtacccaggggacaataccacaccggagcagatggcccagtacacagctgagctccgtagatacatcaacatgctgaccaagcctaggcatgtgccatggacaaggagagagatcccagcccctgggaccctgggcccactccacattcctggccacaccctatccccagcccaagccccatctccagccccagtcccagccccttccaggccactcttggggaaacagagcatctgtgctgaccaggcctgggcccatgtgccctgggcaagagggtgcctacaggcggatatgaaaccggtgggctggcacctgggcacagtgcttccaggtatggagaaagagacaaagaggacacgctggccttctcagagtggggtcttcccatgctgctgcccccaggtgagttcgactccctaccctgtctgtccagctccctgggggtgaaatggggatggtgggactgaatcagggtttgaaaaggtgtggtggggggtggaagagggagaacaggagcccagggctggcctgaggcctcctgacgcacgaggcctgccccccacactgccatgttccactctgtcctcacagagagctcagcccgctggacttgtaacactacctcccgccccctaccactccacgggcagtgccagcccagctctcccctccacactgttggctctggccgaagctcactccctgttcctgcacaggctcaataaagcaagtcaaagcacagcttatctctgtgtctctgtggacccctggtggggggcagcaggaagagccaaatgcatggaaaggggagggcagggcggacgcaacagggaaagcaggctgtgcttgtaaatcatccagaacgtccatgaggtcatcagtcactcagctcatcctctccacagagggacaagttgtggccagaggaaggcagggactcctctgtggtcattcggcaatcggtgaagtggcagtcttgagcttgaatcttcccagttcagcacctgtagaccctcccaacccagccccatgacaaccctgccccaagtgcaccagtgcgttcctgtggctgaggcagcaggagcaccaaaaggtatactaaagcatccttggcatgggggcaggggcatcagcccagcatggaggcacaattctggtgctatggcagtcatggctgcatccaggggcctgagctgccgtccagaaatttggagagaatgggctgtccggagaggtagtgaaatcctgggcgcaggaggtattcaagctgctgtggaaagggaggaggctagattagctgagagttccagccactgccatgaatccaatctgtggattccacactccagctctgggagggcaaagacctggatcctgccccaaggaggactgcccggagtcccagtgcacctgtctcttcctggcccttctcagtcatcctgaataggtggggacagagcgcgcatgtgtgcgtatgtgtaaaggggagaagtgaggaaactagaatgtgtctggttcctagaatggcttctcctgcctcccccacatgcttggcctgaagggatggggttatgggtttggaggatgaggggtccactttcctgagctcagcaccttgcacagaccccatggaagtgactccacaattgtgtttcccctcaagtcctgactcaatctggtgtgtgcaaatgacctggaagtagaaccaggtcctaaaaggcaaagagctttaagagggtgcagctgcttggctcagattgattttttgtttttggagacaggtgttgctctgtcacccaggctggagtgcagtggcatgagcacagctcaccgtagccttgacctcctggactcaagcgatcctcctgcctcagcctctgaagtagctgaaactacaggcacatgccaccatgtccagctaatttttttatttttgtacagacagggtcttggtatgttgcccagcctggtctcaaactcctgagctcaaataatctgctcacctcagcctcccaaagtgctccggattacaggtgtgagccaccatgcccaacctcaggttgattcttaaatccaaggggtgtctggatagagagatggcttcagcaagagaacagtttgagtctgaataagggagcctgaagtcccagcattttatctggcagcttaaggggatggggtgagaatggggagaggtgtggatacttcctagagccaggagttcgcaacctggagacatacctgggtctgagagtaggatcagggcaaggggctctgcccccaccaagcctctctcatggccaagggagcccccagaagagagagagccaccctcacgcccagcttctcagggacaggccctggccaggtccaccccttcccccgctctgctcaccctagaagagcttagaagttcaggaggcaaaggcggccccctatactctgcacggtaaggggcaaaggcacctctttttgttgctgtgccaactctgacagcccaagctgggctgtttggtagaaacttgggtgaggtgggactgggggtgtgtctagctgaagctctcctttgaggttcccacttctctcacctctgccctccctctgcgttggagtctcccctacgctagtggtggtgtgtggggtgaggtgggggaaggttgctgggggagtgaggggaggacccttccacccagcagctgaggttttttctcccacagcaggaactccagggttccccctccccatcgaaggactggtccctccccggcccacagaagtcactgaatcaacagagatttgtctttgttgttttcgctgagggggatgaggaagggttgaggcccctctcaatataaaagggttggtggagggccaggcgtctggaggccaagccccagcctggagaaggaagccccagggcgccagtatctccccgcacgcccacccccgagggcttcctctcgctcccacccaagctgcccccagtcccgaggcccttagttcggtgccgaccgtacaggctgtcctacctggggccccaggaggttggtggtcggggttccgaggtgttcagccactggggtttcgtggtggtccatggagggggtttcgtggctttcggtggggaggtgttcgtggcgtttgcaattttcttgtggtttttagatttctttgtgctgagaacacgtctttgcagcggtcatgaggctgctcccagagcccagcttgggccgcgatgcgcgtgggggtgcccggcggcgtccgtgtccccccgcaccctccgtcgtcctccctcccaacctcgcgccctccgccggatcacctgctgttgaagagcctccccacgtacttcttttttttttttttttttgagacggagtctcgctctgtcgcccaggccggactgcggactgcagtggcgcaatctcggctcactgcaagctccgcttcccgggttcacgccattctcctgcctcagcctcccgagtagctgggactacaggcgcccgccaccgcgcccggctaattttttgtatttttagtagagacagggtttcaccttgttagccaggatggtctcgatctcctgacctcatgatccacccgcctcggcctcctaaagtgctgggattacaggcgtgagccaccgcgcccggcccccacgtacttcttgatcgagcctaaattcagccagctggcggccctggactgctgcggcacctgcagcccctcgcccagggcgccctccggcggcagcagcacccacacgaggccggccacgaccagagcgcatgagcagcgcagagcccgcgtctggagggggcagggcggacagagccgcgggcggtcacgtgaccccacggctggggtcggcgcgatccctgacggtagcttgcgggtgttccgcgccgtgggcagcctggcgtgcaggggcgctcagccgagggacgtggctatttctgggacacacaccagtgcacggacgccctaagggacatcctggtgcccaggggaatggtgcacacctggacatgcccggtgatgcacgcagaaagcatcgaggtaaaaatgaacggggagacacctctaaggtgtacgcacgaggacggcataaaaccattggtcagctccctaatctcaccgacctctctcccgcaaattccttatcgccctcctttctccctgcccttccctcaaagtgtcagtcaggttgtcctcagcccagaagactcttcctccagacatcctcatggccggctctgtcgccccctggaggcattagctcaaaatccaccttttaaatgggtcttatcctgacacccctgtttaaaattgcaacccggcagcgtgcggtagatgacgcctgtaatcccagcactttgggaggccaaggcgggcggatcacttgagcccatgagttcgagaccagtgtgggcaaaagacagagagccctgtctcaacaatttaaaaaataaatttaaaaaaattgcaactcaacccttcatcttgctttttcttgctctatttttgcactttcttttttcttcttcttctttttttttttttttagacaaggtcttgctttgttgcccaggctgcagtatagtgtagggatcatggctcacggcagcctcaaactcctgggctcaggccatcctcttgcttcagcctcccaagtagctaggtctacaggtgcacacaaccatgcccagctaaattttaattttttgtagaaatggagtcttgctaggtggcccaggctggtctcaaactcctggcctcaagcgatcttcctgccttgcctcccaaagtgctgggattacaggtatgagctgccacacctggcctgcactttctaacttatatattctatatttattatatttatgtccgatcccttcccagcggcatctcctccctcagtgtaggcgtcattaattgcagctgggctctttgcttattttgtctattgatggatcacaagcacctagaacagtgcctggcacttagcagatactcaataatacatattaaatgaatgactaacagttacacacaggaacgccagcctgatgattcacacacccaatgcacagagaattttgtgcctgcaacacaccatgattcacagactacgatgcccataaacatgatgcacacccccagagctcctaagcccctcaaccctcttttaaccgggaactccactcatccccaccatcccaagcagggataagaagccttagtagctgtcctgaccatcagaatggcagacgaggctgccctggcctaaccccttcatgcccttagtgagcctgaggagggcccttggtgtcagcccccatccccaggctcctagagaatacagctgatagggggcccaaacattaccatggtgctgggcaggtgcagaggagcacagcaaagcgtctctggccaggacctgagtccctttatattcctaaggatccatgccccctttcccgctaaagttccacttccagcgcagccttcttttcctccccctgtgtcatgacctgaaagtccggaacagagagaaggtgggggtggaagcacatgggctaccagctgttctgaccagggcacagtccctgccaggggcccagaggtgtgggtggcagaggcagggaggcctggggaatagggtaatgttttgctccaagtatacagatccaaggagaaactggctctggggttgagagggggctgtgcttttcccaggggctactgtcagggagttatgctgagaccagatgcccctccccatctggctagatccaaggtgcctcctttccttacagggctgctgtggggtcccagcaccccttattccccttccctaggcctgctgccatggggaaggggtggggttatggtttctggtttcaggattgcaggccccactgcacagcttggagattttctcagcctgcctggccattttggagcccctgaggcatgacctgctaagccttctggagggtggtgggtcttgactgcttggatgatgaacttaggccttggctgcctcaggccacagagcctcagctgtgtggcctgtcaggtcgcctctacccgttcaatattgccacctttctggggcaaggttgtgaaatgtgcgccgattcttcgtgcccaccccaaccccagaaggggcacactaggaagagcaagggcttctgggtaggaatcctaaattcactacctcctggctgtgtgaccttgattaagggacatcatctcccctgagcctccacatcctcatctgtgaaatggagctggttaggactgttgtgaagatggatttggattatgtagctcagcctttggacagctcctggcacatgctagatgattaacaggcgtgagcccctccattcatgaaagaaacgctttctcccatctccacttctgaaagtgtctcatcttctggcctcttctccttattaaaacccgctcctggccaggcatggtggctcatgcctgtaatgccagcactttgggaggctgaggtaggaggattactagaacccaggagtttgaaactagcctaagcaacatagagagaccttgtctctacaaaaaattttttaaaagctaggtgtggccgggcatggtggctcacgcctataatcccagcactttgggaggccgaggtgggcagatcacctgaggtcaggagttcgagaccagcctgaccaacatggagaaacccagtctttattaaaaatacaaaattagatgggcgtggtggtgcatgcctctaatcccagctactcgggaggctgaggcaggaaaatctcttgaactcgggaggcagaggttgcggtgagccaagatcgtgccattgcactccagcttgggcaacaagagcaaaactccatctcaaaaaaaaaagctatgtgtgggtggcacatgcctgtagtcccaggtactggggaggctgaggtaggaggattgcttgagactgggaaattgaggctgcagtgaaccaggattgcgccactgcacttccagcctgggtgacagagcaagactctgtctcaaaacaacaacaaaaacaaacaaacaagaaaaccctgcttttggtgggggtgtgagaaactcaatgtcaatgtcactgaagtttatgggatggctcagtagccaagtgagaccaagactgcatttctatggagccaataatctctagaaaaagaaatgagattaccatgaaaaaattccatagtacagggtgggaggagatatctagggaccagtgtaccctaaataccagtaaacaggctattccttattcccattagtcacagcccagtgctgaacatccccccgcccctacaagagctcaaacgatgtgtccttttgcagtctcagctgtcctaacaaacccaggctcttttgcaggcactgagggctctcagcccctcactcttctggactcccttactaattccgggaactgtggagggttatggggagggaggaaaggtggaagaaaggaaaggaggacgctcagaggctgcctgccaacctctgagggcaggaggcagtggtggcagcgctgtgatgggcaggacgagggaatgcggcttgaggacacagctccaggtgggtatccctgtcaatcaccccttaaactctgactgaaagctgccatttaaatggaccttccaaattcactgtggagtatgtgcccaggttcccagagagcagcaggacaggggctccaagttggtgtgtgaccatttggaccggcccatttccagggcccctgagataagccccgtgggcttcctgtgaggcatgatggttctcaaatatcattctctgctacccactgtggaacagacccagtaatagtgatcttgagtctcctggctgacttgccccagactgaccatccaacccactctgggaccaccgctactcctctctgctgggggtggcccaaacctggcctcccaggggctcactccttcctacctgccctccagtgcatctggggtgctggtgacatcccgagagagacagagagagaggccattagctaggctgcagaccgtggagagcagctggcctaggaggggcctggctgccctgtacagcatcactgcattttttttttaaagtcccatagaagccctttccccttggtgagggagtctcatggtgtcctgtgttctgccctctagactgcatgcttcctgagggcagctggggtcttgttcagctctgaactttcagcatctggcacagtgcccagctcaccgtgggcctccttggatgcttagggggtgggtggaggtgggagggaggcaggaggaagggagggaggagcagaagggaaggagggactcatggatcaatggatgtgacccacaaagggacaaagggacagatgaatgagcgaacaaatacatggcctggctcacctcctcgggcctggaagcagctgccacccatgctcacgtgtccatgtgcttagcttcacatgtggatgtggaagaggcagagggaggaaaccgagggaccccccatctcatctgtgggctcctccaaaacgggcttgtgtctcctcctctcttggatcttccttgctcctctgctcccccaaacctgaggctgggccacacctggccttcaactgccccttattacctcccaggactcttctcatctgggacttgctagggcaggaagggcagtgtggcctgggcacaggggccagggaagaggaaaaggtggcctctcccagcctcctcctccccccagcgttcttctcccagccctcctcctccctggccctcctccccacctctcctgagcgggcccatcctgccctctaggctacagttccagcgctcacgacggagctggaactcaggatggaactcaggatgggactgaaactggagcaggcccaggtgtgcagcgtcccgcagggtctcagccaggtaggggtccctccagcagagctgcttctgccgctgggaaaacttcagcatcagcaggtcacactgcttcaggttggccccaccccgtgttggggccaccgcagcgcccaatcctgggaatggcgtcaagacctcccaccccgtcaggctggagagggcaagaagagggagatgggtgagccttggggatggtggcgtggggcagatgaagggaagggggccttctcgggggcttcatttactgcccttctgggtggcaggctgaccccatgggggtcccatccccattttacagattaggaaaccaaagttcctggaacaaggtttgctgcaggaccttaaacccaagttttccagattccgatctctgctcttcttatccaccctgtttcccaaacttgcccagttagaaaaatcatctggagtgcttattaaaaatacactttcccaggatccatgctgggcaattcggagtctactggtctggaattgagcctggaaatatgtatatttaccacattccccggctagcttttgtgatccaagaagtttgggaaatagcgcacatagtatttgtcgctgcctggccaggagagccacattcctaagaggaggccggcagaggggatgtgcacattgagcggacacccagccaaggtcccctgacatccctctctcccttacataatgttgctgcccaggtaatcccataccaatctaacatgtttccatacttcccagatagaccttcaaccatctgaccacttggtgcctgctacaaatagatgcctggggagggaaggggaggaaaagaaaggagggaaggggaggaaaggaaagaagggaagggaggaaggactgatggatggttggatgaaggtgaaggagctgaattcccatcaggccatcaatcccagacttcttgttctcctagatccaaagttcatcgattctggagccaagctgccaaattctaagactgactttatagctgtgcggtttccttggtttttctcttctggaaattggggagagtgatcttctctacctcctagggttgctgggaggattatatgaaatggactaaccacatgcaggcctaccttcctgctaactggagtttccgaaatttctctcgttttgcaatatgctttactctccaactaagcagagtctcccctttgtccagatatggaaatgatggtttaatgaggaggctgcaactggcttggtcattcaacatattggcagcagggtggaaattggaattagagcttgccttccttcttcccagaaactgtgagatagctctgctgcttcaaaatgtttgctgtcctataccctggtggcccccagtgtgggtggaatatacatcattccaggactcccccccaccgaaagaagtaaccccattctggggcatcctgacctcatagccatggtaaaagagcaaaagtgggttgggtgtggtggatcacgcctgtaatcccagcactttgggtggccaaggcaggtgaatttcttgagtccagaagtttgagaccatcctgggtgacataatgaaaccccatctctactaaaaatacaaaaattagcagtgcatgatggcacaagcctgtagtcccagctacttgggaggctgagatgggaggatagcttgagcctgagaggcagaggctgcagtgagctgagatcgcgtcactgcactccagcctgagcaacaaagtgagaccctgtatccaaaaaaaaaagagcaaagcaaaggtggaagcaggggatagctcttagagctcctgcttggatgtggcacttgccactgttgctcaggtgccactggccaaggcaagtcctgtggtcaagccaggagtggttagagaggcccacatccctctgagccaagggcacagctctcctgtttgaagccacctgccttagccaggatgtctggctggatgccacaccctctctgtatgccccagaagtcagaagcctcaccagaggttatgcagcctggccaggccccaggtaccctcagaaatcacccgtagattccagtcccatcatggagcatatctccgaaacccccaagcagaggtaggtgctattgggctccccctggcccagcctggagttgggctcctctcccagacacggtgagggtagtaacctgttaatcattaatctgggggcaaatcggttcatttccagtccaccagttctacacccaaacccctccctgcagcctggcaggaaaccctcagagcttgacccttggcaggtccagagcagaacaggatgtcaagcccagctgaggaggccacgccttgactggtttccagtgtggagggcagcttgggggctgcagagctacctcgccttcaaacgccctcctcctcacccttctgctcacacagttcccgtgtttcagaaactagacctccctggtagcagctgattgactgacagaggggagaacaagcagggagtgatggaaattttggccaatgaggctgcatatccttcaagacctgcctcaaatgccattttaatagctattattgtcattatagctacattcatatcatatgacatatgatatataacacattattattattttacttaagttctgggatacatgtgcagaacatgcaggtttgttatataggtacacatgtgccatgatggtttgctgcacccatcaacccgtgatctaggttttaagctaagctgcatgcattaggtatttgtcctactgctctccctccccttgtcccccacctcccgacaagccccagtgtgtgatgttaccctccctgtgtccttgtgttctcattgttcaactcccacttatgagaacatgtggtgtttggttttctgttctggtgttagtttgctgagaatgatggtttccagcttcatccatgtccctgcaaaggacatgaactcattcttttttgtggctgcatattattattaattattattattattattatttttgagacagagtcttgctgtgtggtccaggctggagtgcagtggcgtgacctcagctcactgcaacttccgcttcccaggttcaagcaattctcctgcctcagcctcccaagtagctaggactacaggtccctgccaccatgcccagctgatttttgtatttttagtagagatggggtttcactttgttggccaggctggtctcaaactcctgacctcaagtgatctgcccacctcggcctcccaaagtgctgggattacaggtgtgagccactgtgcccagcccaagctgtgttcttgtctgggactcccctatagtgtggagtgaaggctcaaagttggtttgtctaactaaaggcgtcatccttgattatgacctctgacatctggagagtgccagaattccctaggctgcccttggggggcttagggaacctcgtctctataaaaaaaatgtaataattaaccgggcgtggtggtgtgcacctgtgatcttcttcctttgcagtacaaactcttatcgctgcctactggccaattggccaggaacatgcaccctggtgtttcaatctccaaacattaacattttgcctaacaaccaaactattcaggttcctttagtagtccctgtttcctccttctccacacacaccaggcgggctgtacacttcattctctttagcaggggcaaaacatctctgctacactcagcaccaggatagctggttggccctttcttaggaccccaaattttcctcctcataatactaacaattggcccatgtgtactcacttcctatcccactttctcttccaaaggctgaactcccttgtccaggcaacacccagaaacacattaataccatcattctcttctgccaagtccaatatcagtgcctcaaggaaaacagctctgggtagggtgtgctggctcacgcctgtaatcccagcactttgggaggccaaggtgggcagatcacctgaggtcaggagttcaagaccagcctggccaacatggtgaaaccctgtctctactaaaaatacaaaaatttgccaggcatggtggtaggtgcctacaggctggaggctggagaattgcttgaacccaggaggcggatgttgcagtgagccgagattgtgtcattacattccagcctgggcaacaagggcaagactccatctaaaaaaaaaaaaaaaaaaaaaaagaaagaaaacaattgtgaagtcaaacacccactgcttcaaaacacaaacctgagtacagcgccctattcagcaagaagcagccagacagtcaacaatgcccctcttccttttaaagtaaaaggcaagaatgttagtccaaactgcaccatgttgtaagctccctgctattttgcagatcttggtcaaagtgaaacatttcacaggggtttgtgctgtgagaaacatcttgcctaaccacctgaccacaaggtggacaaaggcccaactaaagaaatatccctatcatgtcttgctggacaaagatccaaggaacaccatgatgacatcctgctggaacaagggccagaacagccacatcgtgggaacgaatatctcatcaatatcctgccgggcagcaagccatactgcccaggccactcccacccatacctataaattgccccagcctgtaagcagtgtaggctctggcattaggctggtcttttgtaggttttatgctggatgtaaagcctgcatttgctgttaagctgccctctttctgtgtctttctttagccctcaccttcccttcaaaacctaacagcagtaacatatagtacagttcgtagcttaggagctgtaggccataccacatagcctaggtgtgctgtgggctataccacctgggtttgtgtaagtatacgctatgatgttagcacaaggtgacatcacctaatgacacatttctcaagctcctcctcatatggcaagcaatgcatgactgtatatgaaagctcttaaatagggattaagtttctaaatctctaaaagaaaaaagtcattatttactgcatatggacattttttttttgagatggagtttcactcttgttgtcaaagctggagtgcaatggcaggatcttggctcactgcaacttctgcctcccgggttcaagcaattcttctgcctcagcctcccatagctgtgattacaggcacctgccaccatgcttgttgtgggaagtcagggaccccccgaatggagggacctgctgaagccgtgacagaagaacataaattgtgaagatttcatggacatttattagttccccaaattaatacttttacaatttcttatgcctgtctttactacagtctctgaacataaattgtgaaaacttcatggacatttatcactcccccaatcaatactcttgtgatttcctgtgcctgtctttaatctcttaatcccatcatcttcataagttgaggatgcctgtcgcctcaggaccctgtgatggtttcgttaactgcataaattgttcgtaaagcatgtgcatttaaacaatatgaagtctgagtaccttgaagaaagaacaggataacagcgatgttcagggaacaagggagataaccattagatctgactgcctgggagccaggcggaacagagtcatatttctcttcttacaaaagcaaataagagaaatattgctgaattctttttctcagcaaggaacagccctgagaaaagagaatgcattcctagggggaggtctctaaaatggccgctctgggaatgtctgtcttatacagttgtgataagggatgaaatatgccccggtctcccctagcacccccaggcctattaggataaggaaattcctgcctactaaattttagtcagactagttgtctgctctcaaacgctgtctcctgataagatgttatcaatgacaatgtgtgcccagtgggacatgaaacttcattagcaattttaatttcaccctggtcctgtgatcttgctctgcccccatttgccttgtgatatcttattgccttgtgaagcatgtgatttctgtgacccacaccctattcatacactccctcccttttgaaatccataataaaaactcgctggttttgcagcttgggcggcatcacagaacccgccgacatgtgatgtctcccccggacatccagctttaaaatttctctcttttgtactccttccctttatttctcagaccggctgacacttagggaaaatagaaaagaacctacgttgaaatattgggggctggttcccgcaatatccacccagctaattttttgtatttttagtagaaacggggtttcatcatgttagccaggctggtctcaaactcctgacctcatgtgatctgcccacctcagtctcccaaagtgctaggattgcaggagtgagccaccatgcccggccagaattttttttaaaacattcatttcagtgggaacttaatttggggctagcatgttttatttaactttcaccccaaagttgcaaagtgtttcgaggtttttctctgtaaaataattattttaattcaatttaaataaaacccatcaaggaaactttaacctttaagaaatctagcttcccatgaaatgtgagaggaagtcagcactgatttcagaaatctgattataacagtagatctaccccttgatgaagtgagtcttggaatcccttccatttaaaaccattaatctgcaacatatgcctattctaggcactggaataagatgaagcacctgcttggcgttcacatgctattgattgtgccagacaatgagcaataaaataggtaagaatggcagtgggggaagtcagctgggttctagttacagccgcatttcaggaaattgtttaatatgctgactttaacaacctaaacctcttgtccatgtgtgcacacagggtagacctctgaagagtggcgctgtaatttctatggtaacggctgtgttaagtcaaggcaggaagacagttcagcctcctcgcaggctagtagtgcaaagggctcttcactcggattaaagccttctctcccagactgaattgccccccccactgtgaaccccctaaacttgagacaggtctcagttaatttagaaagtttattttgccaaggttgaggatgcaccaatgacagcctcagggaagtcttgacaaaatatgtccaaggttgtcaggcacagcttggtttcatacatttagggagacatcatgagacatcagtcaatatatgttaagaagtacattgcttcatctggaaagacaggacaacttgaagcaaaggcaggaagactgaagtgggaaggaagcttccaggtcacagatggctgttacacaaatggttccattcttttgagtttctgatcagcctttccaaaggaggcaaatcagataagcatctatctgattgggcaaaggagtgactttgaatagaatgggaggcaggtttgccctaagcagttcccggcttgagttttccttcgtgattttggggaccacagatattttcctttcacatttccccccttttctttttaaaaatctgttggagaaagcattttacaagaaaatgagtctctggtctcaggtttcatttgatctctcatggcgaggacagtttattccttgatgggtaggtcccaaaagctcatttttagcaggttgttaagtctcatgtcctgcgaagagaaaatagtgggaggaagagagagaaaacaacaacaaacaaaagaacaatccgggaaacatttgatataggcctcattactctgaagtctatgcatcagtaggcaggtatgaaagtggtttatgtatgtaaataggttgctgttattttcttctgaagtttaagttgtctggcttcagttcacaggattttaagaaagcacagcttagttttcagtgactccaaattaggaaaaatggaaaaaagaaggaaaaaaaaatttaaaaattattttggagacttgtaataaaaaaaaattagaatttggtccaaactgtagaaagtaatccaaattgaaaaaaaattaggcaagactagaatctaacacagatatataatcatttggaaacataagtttttctccagtttcccattttactaaagacaaatcatggtaggaatagtaaacttattatattggtctatatatttgtatacattgcatcaataataataattttttttacataggcttttaaattggctttgatgtaactttgttccataagagaaatcttggataagacacacccacctcttctgcctcaggaactgactgagactttgatgagactttgattccatttgtaggcacagattcagctggagacctgcccctggagccagagaaatcttggataagacacacccatctcttctgcctcaggaactgagactttgatgagactttgtttgcattggagacctgcccctggagccagagaaatcttggataagacacacccatctcttctgcctcaggaactgagactttgatgagactttgattgcattcgtaggcacagattcagctggagacctgcccctggagccagagaaatcttggataagacacacccatctcttctgcctcaggaactgactgagactttgatgagactttgattccatttgtaggcacagattcagctggagacctgcccctggagccagagaaatcttggataagacacacccatctcttctgcctcaggaactgactgagattttgatgagactttgattccattcgtaggcacacattcagctggagacctgcccccggagccagagcaatttgctgctgcacatcaggatctgtatgacaagctgactcagcaagaaacgttcctagaagtggttccaatgcaagactaggaccagaaccaggccctagcttagcttttcacctcaaaagtaggttgaaaatgtagaccaggatctgtatgacaagctgactcagcaagaaacgttcctagaagtggttccaatgctagacagggaccagaaccaggccctagcttagctttttgtttggactccggtgaaggccccaagatggcgacaggcaaccatcttggccaccctgactcagcattagcgggttcatcttccccccgttcccgccatcccggcaagaacgtgagcccgctaaggcgtgtcacactcaggaaaataaaacctaactaactccgcccttgccccaccccgaatccgcccctaactcacctagtgtccatataagcctgctgcacctccaacacagtgcgacttccccggccctcccctgcggaccagtgaacctcgtccaagagcttaataaaggaacttttgcattctttgccctgcctctcgaccctttttgtctatggaacccttccattgcctttcacttttcacctcaaaagcaaggttctaaatgtagaccagaatctgtatgacaagctgactcagcaagaaacgttcctagaagtggttccaatgctagactgggaccagagccaggacctagctgagcttttcacctcaaaagtaaggttcaaaatgtagaccaggatctgtatgacaagctgactcagcaagaaacgttcctagaagtggttccaatgctagactgggagcagaaccaggccctagcttagctttttgtttggactctggtgaaggccccaagatggcgacaggcaaccatcttggccaccctgactcagcatttctgggttcatcttccccccgttcccaccatcccggctagcacgtgtgcccactaaggcgcgtcacactcaggaaaaggaaacctaactaactccgcccttgccccaccccgactccgccctcacctcacctagtgtccatataagcgagctgcacctccaacacagtgcgacttccctggccctaccctgcggaccagtgaacctcgcccgagagcttaataaaggaacttttgccttctttgccctgcctctcgaccctttttgtccgcggcacccttccattgcctttcacttttcacctcaaaagtaaggttcaaaatgtggaccaggatctgtatgacaagctgactcagcaagaaacgttcctagaagtggttccaacgctagactgggaccagaaccaggtcctagctaagcttttcacctcaaaagtaggttcaaaatgtagatcaggatctgtatgacaagctgactcagcaagaaacgttcctagaagtggttccaatgctagaacgggaccagaaccaggccctagcttaggttttcccctcaaaagtaaagttcaaaatgtagaccaggatctgtatgacaagctgactcagcaagaaacgttcctagaagtggttccaaagctagactgggagcagaaccaggccctagcttagctttttgtttggactccggtgaaggccccaagatggcgacaggcaaccatcttggccaccctgactcagcatttccgggttcatcttccccccattcccgccatcccggctagcacgcgtgcccactaaggcgcgtcactctcaggaaaacgaaacctaactaacgccgcccttgccccaccccgactccgcccctacatcacctagtgtccatataagcgtgctgcaactacaacacagtgcgacttccctggccctcccctgcggacaagtgaaccttgcccgagggcttaataaaggaaactttgccttctttgccctgcctctcgaccctttttgtccgaggcactcttccattgcctttcacttttcacctcaaaagtaaggttcaaaatgtagatcaggatctgtacgacaagctgactcagcaagaaacattcctagaagtggttccaatgctagactgggaccagagccaggccctacctcagcttttcacctcaaaagtaaggttcaaaatgtagaccaggatctgtatgacaagctgactcagcaagaaacgttcctagaagtggttccaatgctagactgggagcagaaccaggccctagcttagctttttgtttggactccggtgaaggccccaagatggcgacaggcaaccatcttggccaccctgactcagcatttccgggttcatcttcccccggttcccgccatccgggctagcatgtgtgcccactaaggcgtgtcacactcaggaaaacgaaacctaactaattccgcccttgacccaccccgactctgcccctacctcacctagtgtccatataagcgtgctgcacctccaacacagtgcgacttctctggccctcccctgcggaccagtgaacctcgcccgagaacttaataaaggaacttttgccttctttgccctgcctcttgacgctttttgtccgcggcacccttccattgcctttcacttttcacctcaaaagtaaggttcaaaatatagaccaggatttgtatgacaggctgactcaggaagaaacgttcctagaagtggttccaatgctagactgggaccagaaccatgccctagcttagcttttcacctcaaaagtaggttcaaaatgtagatcaagatgtatatgacaagctgactcagcaagaaacgttcctagaagtggttctaatgctagactgggaccagaaccaggccctagcttagtttttcacctcaaaagtaaggttcaaaatgtagaccaggatctatatgacaagctgactcagcaagaaacattcctagaagtggttccaatgctagattgggaccagaaccaggccctagcttagctttttgtttggactccgttgaaggtcccaagatggcgacaggcaaccatctaggccaccctgactcagcatttccgggttcatcttcccccggttcctgccatcccggctagcacacgtgcccactaaggcgcgtcacactcaggaaaacgaaacctaactaactcctcccttgccccaccccaactccgcccctacctcacctagtgtccagataagcgtgctgcacctccaacacaatgcgacttccctggccctcccctgcggaccagtgaacctcgcctgagagcttaataaaggaacttttgccttctttgcactgcctctcgaccgtttttgtccgtggcacccttccattgcctttcacttttcacctcaaaagtaaggttcaaaatgtagaccaggatctgtatgacaagctgactcagcaagaaacgttcctagaagtgtttccaatgctagactgggaccagaaccaggccctacctgagcttttcaccacaaaagtaggttcaaaatgcagatcatgatctgtatgacaagctgactcagcaagaaacgttcctagaagtggttccaatgctagactgggaccagaaccaggccctagcttagcttttcacctcaaaagtaagggtcaaaatgtagatgaagatcagactgcagatcatcaggcatatgaggtctcctccatggttgcagacagtttaacctctagtaggctctgtagttatggtaagggatggaattgtgagttgagtcaggcttgaatgctgagcctgacctttgtctggaggtggaaatgtcacctcacggcattttggagctggagctgtagtcgtcagggctgtagaaggttcaacctttgtagtggattcaggcgtgatggtaagcccccgatctaaaggttgaattgtgagttgagtctgacccttgtctgaaggtagaagtctcacctcaggatgttttggagaagaaaatgtagtcgtcagagctgtagaaggttcaacctctgtagtggattctggagtgatggtaagcccctgatccaaaggttgaactgtggcttgagtcaggtttgaatgctgagtctgaacatggcctggatgtggaagtgtcaccttagggtggtttggaggaactatagtcttcttcaagggtgtaggatgttcaacctctgtactggattctgggcttatggtaactcccaggtgcataggttgaactgtaatgctgggtgacattgaatgctgagcttgatcctgacctggtgttgcggctgttacctcttgatatgctggaagttggggtacaactttcttaggaggctgagttggggtctcctgcatggttggagaaagttcaacgtctgtcatggattctggagtgatggtaagccccagatccaaaggttgaactgtgaaactggctaatattgagtgctgagcttgatcctgcccttgtgttggaactgtcacctcatagtgagctggatgttgagctgcaacctccttaagtggctatggaagctgaagtgggaccatctgctggcttgaaagttctatgtccttagggggctctggaacctgaactgtggcctcctgctgggttggagaaggttctgcctccatagagggctctggaatctgagctggaacctcctgctgagttagttatggtccaacctcctgagggaactctggaggcaaagatggggctatctgctgggtcagagagggttctgtcaccatagggggctctgaagactgagcagggcctgcctgctagactggagaggattctacctctttagttggctctaaaagctgagttgggggctgctgtaggactggagatggttcgaccttcttaggtggctctgatggctgagctgatatctcctgctgcggtggaggagtgacctcttcagtggactttggaggatgacctgaggcttcctgctgggttgcacatggttcaacctccttaggggcctctggtgactcagcttgaactcttgctggactggagaaggttctaccttcttaggggtatctggagtctgagctgtggcctcttactggactggaggttcaatcttttcaggagaatgcagaggtggggaaggcagatcaggctgggctagagaaaagtcagcctgctcagtgggaataggagggttgtcttgctggactggagaaggttcaacctccatagtgactgctgaaggtatgggaagctccatatccacatttttaactgtggtattaggcaaagttgaattacttctgaatattgaagacagatctagaggtgaaaatatcatcccatcattcaatgaactttcaaagtctgaagagagctcgactggaagctgagttgtgggctcttgatggactggaggaagttcatcattttcgggatatttagctgctgaactataatctcttgctggtgtttcaaatgttgaaactgctcaggggacactaagggctgacctgggtccccctgttgggttaaaatttcaacctgattagtgaaatctggagtcatggtaaccatgtgatccacaggtttaacagtgacattgtacaatgttggaggctgaacttgatcatgacttagaggagaaactgttacctcatgatgctctggagattgagctacaacttcattaaggagctctggagtctgagctggggcctcctgctgggttagagaagactcaacctcctcaggggtctgtggatgctcagcctcctgctgggctgcagaggggttctgatccttaataggttctggagactgaactgaagtctcctgttgaactggtaaaggcccagcctcttccaatgactctggaggcagaggtgggcccccatgctgggtggcagaaggttctacatcattaactggccctgagagctgagctgtaccctcttggtagactggagaagttcccacctctgcagtaggctctgttgctatggtgagctgcatatctggaggcttaacagtgacattgggcaaaccggaatgctgagcttgatggtgacctggaggtgaaactgtaacttcataatgttctggaggctgagctggggtctccttcttggctggagaagattcaacctccccagaagactcagagggctaagctggctgttcctgctcactgcgggaagggtcagcctccacaggaggacctggaggatcagttgtggcctcctcttgggttgcagaagtttccacctcctctggagactgggttggggcctcctgctgggctggagaagattcagtcttcttggcagactctgaagttatggcaatatccacatccgcaggtttaactgtaacattgggcaagttataatgagcttgatcctcgcctggaagttggactgtcacctcatgattcagtggagtttgaactgcaccctccatagactctggagctgagctggggcctcctgctgggtctgagaaggttcaactcccctaggaaactcacaaggctgaactggctgctcctgctcactgggggaaggttcaacctccacaggaggacctggaggctcagctggagtcccttgctgagttgcagaaggtttcatctcctcagggaactctgttgtctgagctggggcctttaattgggctgaggaagagttgacctccttggggtgctctggaggcagagaggcagcctgttcctggcttgacattgggcaagtgtgagtgctgagcttcactccaacttttaaatgggacatttacctcatgatgtattgatggctgagctacaatttcttcagagggaggtagctgctgtgctggggactcctgctctgttgaagaagagcgaccccctcaagggactgtgaaggcagagctggggactcctgctgggttaaagaaggttctacctcctcagggagctgtggaagctgtgctggggcttcttgctggtgctaagaggactggatctcttcaagggtctctgggttttgagtttcaggctctagaaggaattgagaaagtccagcttgctcatctgagttcatctggacttctgaaggcaggctgcccggatacagttgatgactaagctctgattttttattttgcccaaattcctacctaaggggtctagggagtcatgccctacaaaccataaattctcacgagatgggttttatttgaccctatatatcatgacttacttttcaatgtaattctggcacaaggaaaaaatatttaacccacaatatatttccttgccataccttgaaattgccctgccaaatctcaagtgggaaaaatccacattctatagagaatcaatcccctttcctctttgttttccttcctttttttccagatccaggagagaataaactataagccaggcacccttttaggtccaataagaaacattttataacctactttccccctgaactctgctgagagattcgtctgcacaacaaaacatggtctccacaatcctttatcttaacctgaacattcctttccattgatcccaggtcttcggataaactcaaccaattgtcaaccagaaaatatttaaatttaactatagcctggaagcccccactttgagttgtcccgcctttctgaaccaaaccattgtatttcttcatgtattcgattgatgcctcatgcctccctgaaatatataaaaccaagctgtaccccaaccaccttgggcactgtaaggctcttgtgttggtttgaaccctgagagcacaccaacaaacatgcagctaatgctcagtgcatcaaaagatgctagtgtttgaaagactcagagacttctctcaggaatttgccaagcacttacagaactccatttatatacaaatctttcttaccctgccatctcaaaaggtatggctgatggtccattatctctcagaaaaatgtattatagctccagatggtagaatgaccaggaagaaatttcatcttgcaagtcagtgtttattaagaacccactgtatgcccagcatcacaccaggctggcaagaaacaaaataatcctgagtgatcatccttcacagaaaaaagacttgaatcataattgtaacaatctaaaatccaaacatcatcttttagtgtgtcttatagttcattaaatttttgaattgttaaacactgtgacttggccaggcgtggtggctcatgcctgtaatcccagtactttgggagggcgaggcgagcagatcacctgaggtcagaagcttgagaccagccttgccaacatggggaaatgctgtctctactaaaaatacaaaaattatccgggcctggtggcaggcacctgtaatcccagctactagggaggctgaggcaggagaatcacttgaaccaaggaggcagaggttgcagtgagctgagatcgcaccattgcactccagcctgggtgacagagcgagactctgtctcaaaaaacaaaaacaaacaaacaaaaaaccactgtgacttgattttttactctggagaagcaaaaactacataggcacattttgaaacacttggggaaatgtattgcaaagcaaggatgaagcactgaggattaaacatctgcaaagtgggaaatgatgtgaattctaacaacaggcttagaaagttaacatctctggaaaataaacctctaaaaaaaaacacacaaaaagccaaagcacactacacttggtggaatatattatgcatgacacagaaaaggccaatatgttctacagccacgttcaggaaatggtctggttaagactaaaagacggggacaatgggttctgagaaatcaaatgtggaaaccaacacactttcggacacactcaggcaagcagtccatctaaccctaaatatctattaacaaattccttcaaatcgctgctcagactagggacaaaaacattttaatgcacctgacaccggaaccacacacaaactcggcacaatggcaactgcgcaggcagctttgaaatgctgccttctctacaaatggcctaaattctaaccatctgtctctatctgatcagaaaaacgtttccaccatgtgaatttccacctttctgtctcagaccagtccaaccaggttattttcacttctgcctattccccttcaatttaactgcttcttcttcaggtttttgtgttagaaaaagagattcttctgtctaggtctagtctctgtggcaatgcacaaagtccctgtcatttagggttggtttcctcctcatcaatctttttcagataccccctaaaaaagatgacgctcagagatctgaactccagcccccacaatctgtcaagtgcaggccgacccccaccgcaagcctggcttatgttagcagtgaaggttcgagacagaagctcttctcgctgtctctcctgctgctcccttgcatagcactggtgctggaagtttctgagagcagtctgcagttgatagacatcatactttaactgctcaacctgactggaattgatggaaagagagattaaatttaactcagggcagcagagtctgagggggccagattttgtactgacaaaagacagcatttccttacttctccctacaccacccccccactatcccccacccaccatgaaatctgattttgatcagtgatgttgaaagtaaagaagtagcctgtggttaaggtgagatggtagcgcatgagattctggcagcttgacttcagaatctgctgctctctgattctgaatgcatgacagggaacaggggacaggaagcaggttcactgacctcttcattctcctggaggaagcccaagggcatctttgaggtaaagcatccacgaagcttcataaaactttcggaaacaggcgctgggggtggaggtggcaagggcggtttcattttaatttcatggtggagtatcaaacattagatcagtatttcattatagatggactgattgaagtgatttttcttttcaatccaagaagaacccagcagcaaccaaagagcagaacaaagcttcatggcagcattaggctgcaggtggccatgggtcttgtcagagaaacagaactggaggcaaaatttcaaaacgacacaaagaggtatggggtcacaagtcttctaagccacaaacctcacaggctatttattttgagacggcatcatccagatagaattgcacccgttggggggaatttttctttgcatatagtcttagtttttcaacagaaaattcagaatattctatcacctccccgctgggagaaaaggctctcttaatgggcctggggtatcagagccatgtcagaggtcagcactcagtttggcattctgccttttgttagggggcttcttgctggacaaaatctccagacttccagacagctgaatatcttgccggtctatgcttgcttggattttgttttctactactgcacaaaagagaaaaaagaataattgctggaaaagagacagtgaacttaaattacaatgataaatcaaagattgttttcaatatccaataaactagaaaatacacatttcaaaagaagaaaaatgtatatactaataaatagaaaattcaagttatgctataaatgttgttttgaaaaaagtacatatatatagctgttaatgccataacaatgccaatattttttctttttttttctttttttttaacctctgaactttttattggcctcctgctccccaaagggtcccctgcttctgctggcttaaggtatcagaactttggcatcactggtctcagacaccactttgccatccaatatccggcaggtggtagtcttttggatggtttgcatggagttgctgctgtccagggcatcaccaagattgaaagattgaagtcctcactgtcttccagcaggcggtggtaggtggcgatctcagcctccagcttgaccttgatgttcagcagggcctcatactcctgggcctagtgctgtccctctgcccgggtctgtgccagctctgactccaagtgcagcaggatcctgttgagctgctccgtccgcagggtgtaacaggcctccacctccctcaggctgttctccaagctggccttcagattgctcatggagtccaggtcgatctccaaggactggactgtatgtctcagctccgtgagcgtcatctcagcagctccaacctcggcagactgcgtggtgacaactgcggtgctctcctcaatctgcggagaccagtacttgcccagctcctctaagttcttcggagccagctcgtcatattgggcccaatgtctgccaagattttggcaaggtcatgagatttgggggcatctacctccacagtcaacccagagctggcaatctgggcttataggccctttacttcctcttcatggttcttcttcatgaagagcagcttctccttgagagccttgatctctgcttccagctgcagccaagtgacattggtgtcatcaatgaccttgtggagcccatggatgtcactctccacagactggcacatggccagctctgtctcatacttgaccctaaagtcatcaccagcaagacaggcattgtcgatctgcagaacaatgtgggcactgtccacagtatttgcaaagatctgagccctcaggttctcgatggtcttgaagtcatggctccagtctctgacctggggtcccttcttctccaggtgctcctggctctccagcttccagttcttggtatccaggctcctaactctgtccaggtaggaggccaggtggtcgttgaggctttgcatggtttccttctcattctggatgactcccattcctgccagacccccggccatcactgcgggcaggcccctggaccccatgctgccctggaagctggtgaagcaggacatggagatccgggaaccagagcccctgatgcctgcatagacactggccacactgctgaccagctgggcacatagctgggtgcctggacagtgcccagggactggtagttggtggagagggtggagcaagtggtgaagttcatgctgtccggggaggagagcaagaggacaggactcaggttttgacggccaattttttgttaaagctgaaggtaaatctgtagaaataaatgttctacctttagaaaataaacatttaaaggctgtccaaataaataccttacgctaaattttctgatacagttctcttttcctttgagattgttctcacacatggattataaatacctagtaagaagactgcagattaattccctatagtaatgaggtttgtttgtttgtttgtttagaaacaacaatataggctaggcacggtggctcacacctgtaatcccagcactttgggaggccaaggtaaatggatcatgaggtcaggagtttgagacaagcctgtccaatatggtgaaaccctgtctctactgaaaaatacaaaaattagcagggcatggtggtgcatgcctgtagtctcagctactcagaaggttgaggcaggagaattgcttgaacccgggaggcagaggtggcagtgagctgagattgtgccactgcactccagcctaagcaacagagtgagactccatctcaaaaaaaaaaaaaaaaggactacaataaatgccaacagctctggttgttatccatacggcaaaaagacacctcaggtaacacacaaaacaaactctagctcccttaaaacttaagtggaaaaagcaaagatttcaaactttctgaagaaaatacaggcatgcaaaaatgacctcaggctaaagaaggataaaacccagaccaggcgcagtggctcacgcctgtaatcccagcactttgggaggccgaggcgggcggatcacctaaggtcaggagtttgaggccaccatgactaacacggtaaaattctgtctctactcaaaatacaaaaattagccaggcatggtggtgcatgcctataatcccagctacttgggaggctgaggcaggagaatcacttgaacccgggtggcagaggttgcagtgagccaagatggtgccactgcactccagcctgggcaacagagcaagaatttgtctcaaaaaaaaaaaaaaaaaagacaaaacccaaaaactacccgcccccacaaaacccacaaaccacaaaggaaaagactgatacatctgactacatttaaaaaaaaaaaaacttctgtacaccaaagccacaaaataaacaaataaatgaatagcacagactggaggatctctgcagcagataacaaaggactgatgtgcagaaaatatataaagaattgttgcaagtcaataggaatagtcaaacaggaagttttttttttttggttttttgttttgttttgttttgttttgtttttaatggagaaagggcaaatgacagaaaagaaaacccaaatggtcaatcaatacacaaaatgacactcaaccaggaaaacaaatgagaagcaatgagatcacatttatcctgtcaaactgacatatattttaaagtttgaggacatagggaaactgaaactctcatacccagctggtgggattataaattggtaaaacggccggtcgtggtggcttacgtctgtaatcccagcactttgggaggctgaggtgggcggatcacgaggtcaggagatcgagaccaccctggctaacacggtgaaaccccatctctactaaaaatacaaaaaaattagccgggtgtggtggcaggcgcctgtagtcccatctactctggagactgagacaggagaatggcatgaacccgggaggcggagcttgcagtgagccgagattgcgccactgcactccagcctgagtgacagagtgagactctgtctcaaaaaaataaataaataaataaaaaataaaaataaatgggtaaaacactttaaatgctttctgcttttaaagttatttctactaaatagtagaaataactattctactaaatagtagaaataactattctactaaatagtagaaataactattctactaaatagtagaaataactattctactagttatttttaaaataactagtagaataaagcatgtgtccattctatgacccagtatttttagtattgaggagatgtacatgacatggatgttcatcaaagcacttttgtacaggcccataatccactgacttttcccatccaatctctatttgctttgaaccaattagagaagatgtagcccataatgcaattccaatcattacatttcatgctatgaaaagataaatgtgaaacaacaaagcaagtatgaatggcatgataggaactactaatatgccaagtggaaaatctgtttcaaactcaactgggaattccaacaacacaacatgctggaagtcaatacgaaacagtcgaggccaggcgtggtggctcatggctgtaatcctagcacgttgggaggctgaggtgggtggatcatttgaggtcaggagttcgagaccatcctagccaacatacagtgaaaccccatctcgactaaaaatacaaaattagctgggtgtgctggtgcaagcctgtagtcccagctacttgggaagatgaggcaggagaatctcttgaacccgggaggcaaaggttgcagtgagcctcgatcatgccactgtactccagcctgggtggcagagcgagactccatctctcaaaaaaagaaaagaaaaaaaaagaaacaggtgatgcacaagcatgacttgttaggagtgtggccattagaaaaaagaagtcttgccaggcacagtggctcatgcctgtaatcccagcactttgggaggccaaggcaggtgaatcacctgaggtcaggagttcataaccagcctgaccaacatggtgaaaccctgactccactaaaaatataaaaattagccaggcgtggtggcgtgtgcctgtaatcccagctacttgggaggctgaggcaggagaattgcttgaacgcaagagacggaggttgcagtgagccgagatcatgctactgcactccagcctgggcaacaagagtgagactccgtctcaaaaataaaaaaagaaagaaaaagaaaaaagaagtcttaccctctctagcatgggatagactaccctctctagcatgggtgggtagtcttacccacccgtggtgggcttgggtgataatataacaaagcagagaactagtagcaaataagccagagtcactgttgctgtcttaaaaagggtttatagaagctctaggaagaatttaaaaatggaactgctttttaaaagttcatgaaactattcacccctcctcaacctgtaatacacatcaactttgcatccaggttgcctcttaccactatgagcatgaaacagggtttgggagttaagagatctgggttgaaggtccagttctacaacaaacaagctgggggacactgagcaagtcatttaactccttggtacttccctctcttcaactacaaaatagggatattaataataacaattatttaaaggattataaaactaaatgaaatatgaaaatgctgtgtaacctatacagcatcacgtaagtttgttcttactttacttaaaagtagtggcaacaatctagtcattttcacttcacccactttgcctctacatttagctcatcaaagggcaaaacctgtataggaaaaaaatgttcttgagataaggttcttaagcccagctgctcatcaaaattacctggagggcttgttaaatgtagagcttcttaagacagagtctcactttctagcccaggctgcagtgcagtggtgcaatcttgcctcactgcaacctccacctcctggattcaagcaattctcttgcctcagcctccaccgtagctgggattacaggtgcccaccaccacacccagctaacttttgtatttttagtacagacggggtttcactgtattggtcaggctggtctcgaactcctgacctcaaatgatctgcccaccttggcctcccaaagtgctgggattataggcatgagccactgagcccagccctaaatgtagagcttcttgtgccccagacatactgaggttctctagagataaggtccaggacaggggactgattttggactacataggggacaaatgtgaccccctttaccattatggagatctcaaaaatagaagcttggctactagctcctctataaagttcatctaaatgaaatatttaagtgtaaaatgtttattttttcattttttttcatttattcattcattgttcaggtaagttcagaaattttcaaataaccttaaaatgttacactgagactataatcctaggtggcaataatcagtcctctctaaacgtggcacaactcacaccacttgctattgtctcacactcagtcaatttcaaatatgtatgctaccacgaggccccagctcctaccttctttgctccctccttctgaaccaaatgggagttacaagaaaatccagtgggagttctatctactggtttgagaagatttagtgagaaaggaaaaactggattttaaactaataaactacatttgaaaagatattacactacatgaaaagatattacactttgttctcttttccagatgtttaagcaccattactttgaattttggtggtaaattttaaatgaactttctaaagattttctttaataaaatagatttcttataaaacactttttactttgtattcttattttcaggtttcatcccactttaaaataccaatgcttctcatggaagaataaagtgattccactaactcacagacacctgtgctccacgtatctatcagcaagtatagctgcatgtacagaaaatagttgcttgcttctttattctcacaagctgagacttttcacttgttaatcattaaaaaaaaaattgaaattcttttttttgttttttgagatggagtttcactcttcttgccctggatggagtgcaattgcgctatctcggctcactgcaacctccgcctcccattctcctgcctcagcctcctgagtagctgggattataggcatgcaccaccaggcccagctaattttgtactgtagagacggggtgtctccatgttggtcaggctggtttcgaactcccgacctcaggtaatccgcctgcctcagcctcccaaagtgctgggattacaggcatgagccaacgcacctggccaacaaattgaaattctaagttaaattgctcagttctctattaagcctccactgtacctttaacttcataattacaacagtcattatactgtattaaatttgttacatttgtctccttattagaaataagcctctggagagcagaagggcagacgttatattttactcactcttaaagacttagtacagatctggctttttttttttttttttttttggagacagagtctcacactgttacccagatggctcactgcaacctccacctcctgagttcaagtgattctcatgactcagctttcaagtagctgggaatacaggcatgcaccaacatgcctggctaatttttgtatttttaggagagacaggatttcgccatgttggccaggctggtaatccgcccacctcagcctctcaaagtgctgggattacagtcgtgagccacgacgcccgacccagatctggcatattctaagcatgcaataaacaaatgcagaatacaaaacaagaaaagcaacaatagagaatacataaatgcacagtaattactatcctttaggaatttacagtctactgagggtaaaagacacacatcaacaaaaattatacaagagagaacatttaaaatgccacaggagagaaatataaagtataagaagaaatcagggaggaaattacagtataagatataagttacagtactttctttttccctggacaccaatttccatccctaaatatttggcaaaagttcttaccactcaattttaacctcaggtttctagtgaatttatactcatcatgaaaaatatatattacgacttcaagtgccctaagaaaatatatcatattcagaattatctccactttttccggcccagtatatttcaattctgtagcactggtattccttaccactatcatatctccccaggatagagaagtgaactagcacctacagtttaggtatgttaaggcatattggttaaaagcataggtttcagtaccatgattctaccacttatttgctataagaccttgggcaaattattgctcagaatgtcaatttcctcacctataaaatgggaatgtctatctcaaagaggatttaaattagataattcatgtgcaagcactcagtaaacaataaatgatagctgttataaaggattaacaataaatctagtgaacaggggcttgctagtcaaacacgtgcataaactgactatatactgtgcttcatagttcacgtgttttatcaaccttcatagttatacctccctttccatttccagtgctattactttttcaagcctttatctacactcatacccagataactttctaaatggttttccatctccctcctcagacatacattgaccagactattattttatttccaccacaaatgccaggctggggtaatggaaagagctttagatttcaaataaaagaatttgggtttgggtttcagcagtatcactaaaacattgtagaatgctaaaaataaatttctcaactgtataatgagttttagattaaattatcttcaatctctctttgttgttgttgttgttgtttttaagaaagggtctctgtcactcaggctggagtgcagtggcattatctcaactcactgcagccttgactttctgaacacaagcgatcctcccacctcagtccccaaggtagctgggactataggcatacgccaccatgcccagctaacttttttttttttttttgtacttttagtagagacagggttttgccatgttgcccaggctgttctcaaactcctgagctcaaacgatccacccaccttggcctcccaaagtgctacgattacaggcgtgagccaccatgtccagccttcagtatctcttcttgctataagtctatacctctcttctgatcaaaaattgcctttggcttacaaaatacaattccgcattgaaggagcattaaagccttccacattcagtgtggcatgagttttggaggcagaaggcctaagatcttaatcctgattctatagtttactggttgcttatccttgaacttattaaacttctctacacaaaagagaagtttcttacacgaaatgggaataacagtaattctctcaggggcctattataagattttaatgagatatttgttaagtgcttagcacatagtaaacaataaataagtatgagatttgtgcctattctaatatttcccatttctgccttccagttataagggtgtgtgtgtgtgtgtgtgtgtgtgtgtgtgtgtgtgttgagacatggtctcactctgtcacccaggctggagcacactgacatggacagggctccctgcagcctcaacttcctggcctcaagtgatcctcccacctaagctgcccaagtagctaggaacaagggtgcacaccaccacaccaggctaatttttttttttttttttgtaaagacagggtctcactattgtagcccaggctggtctcaaactcctgagatcaagagatcttcccacctcagcctcccagtgtgttggggattataggcgtgagccaccgcgcccagcctagttacagtttttgtttttgtttttgttttaagatagtcttgctctgtcgcccaggctggagtgcaatggcacaatcttggctcactgcaacttctgcctccagagttcaagccattctcctgcctcagtctcccaagtagctgggattacaggcatgcgccaccatgcccagctaatttttatatttttagtagagatggggtttcgccatgttgccaggctggtctcaaactcctgacctcatgatccacctgcctcggcctcccaaagtgttgggattacaggcgtgagccaccgcacccagcctatagcttttaaactgttcctggagacctagaactctgcttcaatcaaaacaactgagtgggccgggtgtggtggctcacgcctgtaatcccagcactttgggaggctgaggcgggtggatcacctgaggtcaggagttcgagactagcctggccaacatgatgaaaccctgtctctactaaaaaatacaaaaattagctaggcgtggtggctcatgcctataatcccagctactggggaggctgaggcagaagaatcgcttgaacccaggaggcagaggttgcagtaagccaaggtcacgccattgcactccagcctgggtgacaagagcgaagctccgtctcaaaaacaaaaacaaaaacaaaaaaaacactgtgtgggcttcccttctctttcatatactgaagttcaacattaaaaaaaaattttgaggtggtttcttctgttaaagaatgcatgaaatccactatgccatagacacaatctgctccaattagctatgcctactctttgtcaactgcaattactgtgtatacatcagtatctcctgtctttggtaatacctattcctctctcctcaggacttctttccgaagtcatccctagtcactcttcttttgaacccttatagcattttatttttattatttagagacaaggtcttgctctgttgcccaggctgcagtgcagtggcataatcatagctcacggtaaccttcaaatcctagacacaagcaatctttttacctcagccccccaagtagctaggaccataggtgtgcactaccttgcctggctaatttttagatggggtctcactatgttgcccaggctcaaactcccaggctcaactgatccttctgctttaaccttttgagtagctaggactacaggcacatgccactggaactgcaacttcttttctgattattattttttcttgacttaactcacatttaaggtcttttaatttatcctttaaatgtgatgatctctgtactaggaaacaagtagtccctttatatacagcatgcaagttccccattctcattccctctcctctcctgcaatccctttcatcctcatatttattttaatttttgtagagacaggctctcgctatattgcctaggctactcttgaactcctgtcctcaagcaatcctcctgctttggtcccccacagtgctgggactgcaggtatgagccaccacgtccggccctttccttttctattttatccctaaaacctaacctcttactgttgacagccaattctgactaatcttgtttattatctgggcctcttttctattgtttatatttattccattaaaaaggtcaaagactctatagagcccataccttattaaatctggtttgtaaataactaaaattatgcttgcctttggcaactgaataaagactccaaggcccatttaattagcaaaaaaacagagattacagctatatgctccttcagctacgccagctctctgtataactcagcctttctgacaatccataccttgctttgtgatttgggggagctgcatgtttgctatcctaccacctacctattcctattttcagtatcagcttttcctgagaagggaaaaggtatgaatattgatttcaaagtcaggcttatgtttgaatggcagagactcagtagctgtataaactttccaaaactttcaatttataaaatgagcatactaatatctatttcattaaatgagacaatgcaaaacatctagactctagatcaatatttggcacataataaatattaagcattatttcctttttacaaaggaaaatatgaattgaaaaggaaaagtaaggccaggcccggtggctcacgcctgtaatcccagcactttgggaggccaaggcgggccaatcacttgaggtcaggagttcaagaccagcctggcaacatggtgaaaccctatctctaccaaaaatataataaattagctgagtgtgctggtgtgtgcttgtaatcccagctacttgggagactgagccaggagaatcacttgaatctgggaggcagaggttgcagtgagccgagatgatgccacagcactccagcctgggcaacaagagtgaaactccatctcataaaaaaataaagaaagaaaaggaaaaggaagatacaaagacaacttagcttctgcaaagtctattcagaaaaatgtatctatgtcactataatattaataaaaatattttctcaaagaatgatgtttcttaagaaattagtaaaatattgatactgattgattgagacaggtcttgcataatttatttatagagacaggtctagctctgttgcccaggctggaatgcaggaagtgcagtggcccatcacagctcactacaacctccagtaccagggctcaaacaattctctcccctcagcctcccaagtagctaagactacaggcatgtgccattgggcttggctaatttttctatttctgttgagacagggtcttgttatgttgtccaggctggtcttgaattccaggcctcaagttaccctcctgcctcagcctcccaaagtgctgggattacaagtgtgagccaccacaccaggtcagaagttagtgcaatattaattagcattctaatttaaccataaggcctaaattgtaacattacatgtttctattctattgtattgaattcaaatctagttttctgcctgtaatcctagcactttgcaaggctgaggtgggaatattgtgtgaggccaggagcctgggcaatatagcaagacctcatttctagtggaaaaaaaaatctaattttcatttagtcataaaatgtagactaaatattgttgagacttacctaatgcaggccttactctactgtagtcaccatttatttcctaactgaaacaagactgggaaggaggtatacataagcaaaaccgaagaaatgccccaaccctactctgctttcactctgcccactctaggtcttttctaaaacaattatattttttgaatagtaatacaagtacatgatatcaaattttttttttttttttttttttttttttttttgagacggagtctcgctctgtcacccaggctggagtgcagtggcgggatctcggctcactgcaagctccgcctcccgggttcacgccattctcctgcctcagcctcccaagtagctgggactacaggcgcccgccactacgcccggctaattttttgtatttttagtagagacggggtttcaccgttttagccgggatggtctcgatctcctgacctcgtgatccgcccgcctcggcctcccaaagtgctgggattacaggcgtgagccaccgcgcccggccgatatcaaattttttaaatacaggaaaatgcaactcagtttcccttcagagagtctatcgttacacaaatttttatcttcatcatcaagcaaatacaaacataaatttacaggcacactcctgtatacccacagaatgcaccattttaatatttcacaataaaatgcctcagttttactacccaagctgtagagaatgttcatctctcttaacacattttttcagctaatgattttataaagtaaaatttttacatttatttatttcaatcccaaaacataatacaatgttctttaaaagatgtgtgagatgtctggagatatattccaaataaaactaacaaaactttgaaaaatctgcttcaatatcaacaaaaggaatgtacgtgttattacacaggaagcaactgtgtgttatattaattatttagtaaccaggaagaaatgcttaagaattttatatcctaaaaattttgttaattgcatgaatatggccaggccagtggctcacgcctgtaatcacagcactttgggaggctgaggcgggcggatcatgaggtcagcagttcaagaccagcctgaccaacatggtgaaaccccgtctcaactaaaaatataaacattagccaggcgtggtggtgggtgcctgtagtcccagctactcaggaggctgaggcaggagaattgcttgaacccgggaggcagaggttgctgtgaaccaagatcgcgccattgtactccagcctgggcgacagagcaagactccatctaaaaaaaaaaaaaaaaattgcacgactagcccaggcatggtggatcacacctgtaatcccagcactgtgggaatccaaggtgggaggattgcgtgagcccacgaatttgagaccagcctgggcaacatagtgaaaccttgtctctataaaaagtttcttaaaaattagccaggcatagtggtgtgcacctgtagtccccactactcaggagcctaaggcagaaggatcactagagcccaggagatcaaggctgcagtgagctatgattatgctactgcactccagtctgggcaacaaagcaacatggtctcaaaaaaaaaaaaaattgctggattcaagaatacctccattttaatttttaagtaatctaaattgttctctgtagtggctttcaccaatttctattctcatggctatggtgtaagtacctattttcccataatcttaccaagctaacatttcatagtttaatatgcacgtctcttactatgagaatggttgagaatattttcatatatttgaaggccatctgtggccaggcatggtggctcacgcctgtaatcccagtactttgggaggccaaggtgggtggatcacctgaggtcaggagttcaagaccagcttggccaacatggtgaaaccccgtctctactaaaaatacaaaaaaattagccaggtgtggtggctctctcctgtaatcccagctactcacaaggctgaggcaggagaatcacttgaacctgagaactggaggttgcagtgagccgagattgcaccattgcactccagcctgggcgacagcgcaagactccatctcaaaaaaataaataataaaaagtaaaggccatctatattgcctttctgtacacagtgttcataccatttccccttttctattatatttaggtctttcttaaactgataaatccctgaagcaaagttgttctttgcctataatgagatattacagatatttttcccagtctatttgtttgttgactttgttatgatgaaatataaccaaatttatcctttccttttttgaggcaggcttgctgtgttgctcaggctggagtacagtggcgggatcatagctcactgcaacttcaaactcctggagtcaagcgatcctctcacctcagccttccaaatagctaggaatacaggtgcatgccaccatacccggctaatctgttttttttttaattttttgtagagacgaggtcttattgttgcccaagctggccttgaactcatggcctcaagtgatccaccaccttggcttcccaaagtcctgggattacaagtgtgagccactgtgactggccttatacttttcttaacccatttatgcctgaggttgcaattttttaaatttttgcaatcagaccttggcaatgaccttgaacagtaggacacgaataactcccagatgcttagcattccaataatggaatactaggcatatttgtccatgtcttatggcttctaagttttgggttaagcttagaaaagtttttcttattcaaatattatttttaagataattccaccattgttcatcctaataattttatgatttcattttttacatttaaagcttttattcatctggaatctatctggggtaaggaatgacaatggggatccagttatttaaattctgggttgttattcagttgtcccaacaccactactgagtaactgaagctctttttagatgattttttagaagttagactcagaagtagagatgactagtgagctcagaattagtgaaaccaacaccaaaattaggaatttaggggtcctaaaacacatataacattaaaagcacagatcctgaagtccaacatctatcacatacaaagcatattaactagtactgttgttagacttggaagacctaaggatggattatctctaattcagttaaaataactatgtactatacaataggtattaataataagcatttatatggcacttttacagtttgtataatgtgagttcacttactttgtcttcataactactctttaagaagatgggtagagattttaatttccatttattgctgaggaaaataattcagtggtggtaccttgtccctttacttataggaattggtagtgccaaactcaaacccagatctcatatttccaaatattagcactctgcttttatatcctgcaccaagtacttttatgcaaaaattaatgagacttcctactcacaaggaggttgaaacgatttttcaattaaatattcagaccaatcacatacttaattctaagcatgaaaggagtacacagaagtagaaaacatccttggctttaaggaaacttcaaaggtctacagcagtttaaacaaataaggcttgggagactggaaaataaacctgaaggtcaggaaccatcttatctactctctccttgtcatacagtatttacagctggtataactagaatgtagtgttaggtcagtaaatatttgttggttgtctaaatgtactgatcgaaacttctagacagggtgagatatgaaataatatcagatcccacttatttttcccaggggctaaacttttgtctgtgaccaaagactcagccaaatcatcaaacagttcttagacaatgtaagtctacacctactgggctacacctactgactaaatgtatttcacagaaaaataaaaatgttgaactacatttcatttcaaaactgccaaaaggttataaaacaatttccagaactgaatctagtccaactgctacaaaatacaactatcattcactcttgctttactctgaattaaacacatcttctgcttctacaataaataattgttcataatatttctcatcagttgtgctttctttgtgttgtttccttcagatatcttgtcaacatatattttctgcaggtcttttattttttaatactaacaatcacttatctgccacatatgataatttttttaaaacttctgaaatattttagcaaatactaagggagaacaaaacatgaatatgaaaatagaagtacaaaaataaactcagtttacaaagttcaatttgtatcctgccacagataacttcacttcagagtctgcacgccctattctcccatctatccagtgacaagatattggcattggagcctcaaggactgcaacttttgttggcaaaagccttgcatgggtcaagataatttttaagcctttgataaagaaagcccaaagagaccaggcttaaaattttagtggatggttgcgtgttagatatgttagagtcctaaactcaaataaaaaggcaagttgacaataaactagtcaatgcaaagagcttacaaaagcataagcccagaaattacatgcaatgcctagtctataaaataccaagaaggcggctgggtgcggtggctcaagcctgcaatcccagcactttgggaggccaagatgggcggatcacgaggtcaggagttcgggaccagcctggccaacatagtgaaactccatctctactaaaaatacaaaaattagccggatgtgttagcacgccacctatagtcctggctacttgggaggcagaggtgggagaatcgcttgaacctgggaggcggaggctgcagtgagccgagatcgcgtcattgcactccagtctgggtgacagagtgagactccatctcaaacaaaacaaacaaaaacaaaaacaaaaaaaacaagaaggcatgactgtttacaccagagtgacagggctttcttgagtggttatttatagcaaaggtttagtacagttaaagaaatctgtcataacttgtttcaatatgccataaatgtggatatattctaggtaaaattatgtgggtgctacagaaggagatacgtgagagaaaccagcacaatgcctgcacactgttgaatctgacactaggaaataaacagccagttatgaaacaaactcaattcttaatgttggaaacagaataaggctccattctttttggagaataaagacactaaccatttaaaacagatggacttcacaccaacatgtgaatatacttaacatacagaactgtacacttaaaaatggttaagatggtaaattttatgctatatgttttggaaagggggaattcttttttttttttaagcagagacagggtctcgctctgtcacccaggctggagtgcaatggcccaatcatagctcactgcatccctcaactcctgggctcaagtgatcctcccacctcaacctccctagtagctgggacttcatgtgtgtgccaccaagcccagccaatttaattttttttgtagagatggggtcttgctatattgcccaggctggtctcaactcctggcctcaagtaatccttctgtctcagcttcccaaagtgctgggattacaggtgctagccactgcacctggctatgttacgtattttttaacaattaaaaagaaaaaaaaacttcaaatgagctttaaatttcccttgtatttttaaatgaatagatttatgtgttattgagtacttactatatatacctgttaccatggagatggaggtaaaatatagagaaaacctattcctcttttcaagaaggtcaaagcttaaagagaaccaaaattctaaactgttcttcttttttatttccttttttttgagacagggtctcactctgtcacgcaggctggagcccagtggtgcaataatggctcacggcagcttcgaccttccgggctcaagcaatcctcccacctcaagcctcctgagtaactcggaccacgggcatgcaccaccatgcccaactaattttgggggggggcataagagaagacagagatggggtctcactatgttgcctaggctggtctcactgagctcaggtgatcctcctgcctcagcctcccaaagtgctgagattacaggcatgagccacagcaccctgcctaaaatctccttaaaaacaaaaattgataataattttggatcactcaaagtagatgagtagccatttacctatgctctcttaaatacattatctatctcttccccctcctttcctctctgcagattctgattgtactttaaagtctctgatgcttaaaatgaacattctgggattcaaacagatttgctagctactatgaaacggccccaccttgtgtgcctgaacaaagagagtaacaatcaacaatgctcctgggtgtcctggaatagaagtggtatttcaaattggagggaaaagcaaatctagtcttctggtcttcttctaaagcaatcacttccattcagttcaacccaacacttacaactatgcaaaccaatgggacaaattctatcaaaaagccaactctatttcagtcttcattatcttctctctcctgggctcttacaaaatctgcggtctagccaggtgcagtggctcacgcctataatcccaccactttgggaggccgaggcaggaggatcatgaggtcaggagttcgagaccagcctgaccaacatgatgaaaccccgtctctactaaaaatacaaaaattagccaggcgtggtggcatgcgcctgtaatcccagctactcaggaggccgaggcaggagaactgtttgaactgggaggcagaggttgcagtgagctgagattgcgccattgcactccagcctgggcaacagagtgagactccatctacaaacaaacaaacaaacaaacaaaaaccaatctgtggcctataccatacaaattgctcttaatcagagtattctttgtagtgtttgcaaagaattcttgtgccactggaaaacaagtttaaaggtaatcgcacctttcgaactccccaaaagaataggttaatgcttagtgatgaatattccatcaaaatatatttattgagcatctcccatttgtcaccactgaatttgcagaagtagaatttaaaaagtaaaggttttaataactgaaatgtcctatatttcaagtcctatcctcttggtttctctctctctctttaattaattaattaattttttcttttttaaaaaaatagagatggggtcttgctatgtcacccaggctggtcttgaacacctggcctcaaacagtcctcctgcctcagcctcccaaattgctgggattacaggcatgagccactacacctgtccttgttcctctcaacacacttgaattgatcagacttcagcattcaaactgtcaaaatcaatttacaaaattcaaagaattcgtcaacagtagcacacttctccccaaagatgctcttatacaataagctcccccatgaccagatgtacaggcacaatgattcccataatttctgaggcagcattcacatcacatctgcaaagaacaaacagtagctcttgaatccgagagagctaaaaagtgaatgcagctgcttggtttccaactagcaagaactcagaagctgaaataatccaaatgactggtatagttaaacagggtaacaaatgcaatggaaactttgagccatacattttccagaccttgataggaacctgagaaataacctctctgcttagagagccctcagaaacccctgctttcattttatgtttcatgggggttaatttttctttctaccactacacagatctcttattgcagagcaaaagagccagggcaatcaccagcttcagggagaatttaaaaggataaaaattaaactctgctactggatgattctctttataatactgaagccacaatacattactaaatagcacaaataaagcatactctgatattctgcattcctttcactccacccacccatcacctccaccaaaaaaaaaaaaaaaattaaaaacaggttgagccacacacagtatatttgacttgaaagtttcgatgacacagcagcttactcttgcaaattactggcaaatttaacagtgacttaaaatacagttataggaaaaatagactaatctaagggtagaaaggcagggaggcagaaaaacccaagcacctttttagaaagacaacaaatatattcaggtacaagatctgcatcagaaacagttttctttctttttctttggtaaatgtaaagacttatcctgaagagattttctcaatccctggcccagcttccacccatgtttctggagtaagcagtgtccaatattatcctgacagacaaaacatagagacaaaccaaaaatattccaatagtatattcttccctgcctagtgacacttaaacagatgatgagcaagcgataattctacatatatgcatgcaaaaaggtgctaataatagcgtaaatgtgtccaataagagggacactaatgtaaaaagaaaagctggctagtattttatatgggaagaacatataggataaaggtcctttctgatggtgtgctgggcaactttcgtacataacattttaaaatggagaaaaaggggaaagggaaaaggggaagaatacatttatgaagttttaaagtaacattaaaaagcataaaataggccagacgcggtggctcaccctataatctcagcaccttgggaggccgaggtgggcagatcacctgaggtcaggagttcaagaccagcctgaccaacatggtgaaactctgtctctacaaaaatacaaaaattaaccgagcatgatggcaggtgcctgtaatcctagctactcaggaggctgaggcacaagaattgctggaaccccagaggcggaggttgcagtgagccgagatcgtgccattgcactccagtttggggacagagcaagactccgtctcaaaaaaaacataaaatcaaagtacgtatacagtcatatctaccacctaaacagcaccactttaagattcttttttaaagataatatacattgtgtttagttgttttatgtgtcaggctttcatgatacaaagtaagttgtaaatgtaagactgtcccaccactagaaatgaaaaaaacaatcagagcaaaatccaggctagacttgattggttttagaaaagtgtgtgtatatatatatatatacatatatatatatacacacacatacatatatatacacacacacatatatatacacacacacatatataaaatatatatgtatataatcccagctacttaggaggctgaggcaggagaattgcttggccccagggggcagaggttgcagtgaggcaagatgtcgccactgcactccagcctgggcgacaaagcgagactccctctcaaaaaataaataaataaataaataaaaagaaccattagtgcacgtagtggggagaaaccaacatacataatgtctcatcttcccaggagcacactggaaaaggtattccaatgtaaactacatgaaaaaaaatgctaaaaacaatgattaaatgtcagcttttgtttaaggggtcaagctatcagaaacatctgcagctctttgtccagttgtttgctttttacagttattgtgaagtacgaagacaaggctaaaataagcactaaccgtatcagaaaaaatggtgctatacattcaaaggaaaagattgaaaaattctaaacacaaggtattctatatgtattaaaatgtaatttatagtattaatctagaaaagattaaaagtctcaatataagtaatgttaccagaaaacaaaggtaaaccatttgaaaataatctcatatttcctgaaatcaatttataaagctgactaaaccacaaatttctgcattaaaaccaaatattgcacattaaattgtttgtcttacatctccatattcaatgataaaatgttctttggagtcattgaggaaagaaaaacattgttctactgttatcttctctaactagaagtcagaagaaaattaagccttccaaatgctcagttgtgttttgtttttaaaggacaatttccttcttaaatttataatagcatacaacctacaaaactgggctaagcagctgattatttctttgatgggggaaaatcaggacacttttttttttttttttgatacaggttattgctctcttgcccaggctggtgtacagtggtacaattacagctaactgcagccttgaccttccgggctcaagcaatcctcccacctcagcctcacgagtagctggaattacaggcacacatggccttggctggctactttttacatttttgtagagacaaggtttcattatgttgcccaggatgatctagaactcctgagctcaagtgatcctccctcctcagcctcccaaagtcctgggattacaggcattagccccggatacttcttaaaaaacaaaaactggaggcaaactataatgaaaaattgtttctaaaacaaaacatatattgttttaaatatacatacatatatatatatatatggtatcattatggtacacaaaagtttgctgcaagttatttttgctacatatgaactgaaagaattagaaacactactgatgccaagtgctgacttccacattactatacatcacgaaaacttaatataacactactgctgctgaggcttcttcccttctcccctcccaaatgaactgccaggaaaagcattcccttacccagtgctcagcatctatttataactttcttaccccccaaaaaaaaaagattaaaagtctcaatataagtaatgtttgcagaaaacaaaggtaaacaggcccttattttactactatgaaaacaaacttacctgtgcagaaaatccttatttcatatcataattcctacaactgaataattctagaaagggcaaggatagcagaatgactctaagagtatatggttgattattgtttaatctctctctctctctctttttttttttttttgagactgagtctcactctatcgcctaggctggagtgcagtaactcactgcaacctccacctcctgggttcaagggactcttgtgcctcagcctcctgagtagctgggattacaggcgcccaccactatgcccagctaatttttgtatttttagtagagaagacatttcaccaagttggccaggctggtctcgaactcctgacctcaactgatccgcctgcctcggcctcccaaagtgctggtattacaggtgtgagccacctgcccggccttgtttaatctcttaatagactcatgttgtaactatatttggcaccaagatttaggtattaaacaatgctgacaaaaattgttcctccctcccattttgttgttgtcattatttttttttaaaggaaactcaatctttggctaagtggagatgagacattatgctgactgtgttatattatgaatgcactaaaataaacatgcaaatgaagcagtacactatttccgaaagcagtccaagtggagtgagagcatttccatacaaacctggctttcaaaactgggctgtcaaaagaacagttaaatgtaacacaaagtgggccgggcgcggtggctgacgcctgtaatcccagcactttgggaggccgaggcaggcagatcacgaggccaggaaatcgagaccatcctgactaacacggtgaaaacccatctctactaaaaatacaaaaaattagccaggcgcggtggcaggcgcctgtagtcccagctactcaggaggctgaggcaggagaatggtgtgaacccgggaggcagagcttgcagtgagccgagatcacgcctgggcgacagagcgagactctgtctcaaaataaataaataaataaatgtaacacaaagtaagaaactgtccaatcacagttgattgatggtcttttttttaaatcttgttttcaattcactgcttgcaagtaatgtatgtattaaagaagagtgaaagcataagtaaattcacaagtcaaggccagctgagagattcaagagcagcgtgttgtgactgacaacagtgaaaggaaaagcaaatgttaaagggagaaggagaaaaccgaaaaaatttaagttacacacattagcgccatttttacaaaaccactcaagaggatgctgtcaccttctcagaaaaaaaaatggtagtggcatttttcttcaaaaactttaggttaaaactgttatttaattaaatctactttctcagggactataataaaatagtgaataggccactctaagtctttccaatcataacaaaggcaacagaaacaatagacacttctcccagtatcccctcccctcaccaacctcccagggcaagtgaatgaccaacacagaaaacctggaactttcctatcatttcaaactacctgctttgggaggaaaagaggcagccctgtgactctgcaggaagggctagtattcagtctggtcccctttcccaccaataaaagaaaaacggttctataaacacttgtcaaagtccaataggcttagggtaaggttttataaacattcatcaaaaatccaataggcttaaggatgatgggtaacacaaggaggcacatcaaaataacttataacaaagtaaaaacaaaccagacttgtctatctctgaaatgatcaaaactttctctgtgaaagaacaagaaattcaataaccagtctgtgagaaacaagcaatctattctctctgtttagtactgtgattttttcaattattcccatggatgcttttttttttttttttttttgtgagattgagtctcactgtcacccaggctggagtgcactggcacgatctcagctcactgcaacttctgcctcctgggtagctgtgactagaggcacgtgccatcatgcctggccaatcgttttttgtatttttagtagaggagggtttccccatgttggccaggctgatcttgaactcctgacctcaagtgatccgcccgctcagcctcccagtgttgggattacaggcctaagccaccgcgcctggtccatggatgctactttttaattttatttaattttattttttgagacggagtcttgctctgttgcccaggctggagtgcagtggtgtgatctcggctcactgcaacctctgcttccctagttcaagcgattatcctgcctcagcctcctgagaccctgggattacaggcacgtgccaccacgcccagctaatttttgtatttttagtagagacagggtttcaccatgttggtcaggctggtctcaaactcctgacctcatgatctgcctgcctcagcctcccaaagtgctgggattatattacaggcctgagccaccacacccggcccatggatgctatttataacactaagttggtacaactagcttatggctcaaacatgtaatctagacagaacaagagcaatgaatactaaatttctttcttaccttttcttttttttttttttgagacagggtcttgctctgtcacccaggctggggtgcagtggcacagtcacacagctcctgcatccttgacctgccgggctcccacgcccagccaatttatttctaaactagtaattattttgaaaaataattttttaaaaagtaactctttacttagtttcagttactataataatgactaaaaatcttttggcttttttttaaaaaatatatataatttggggtttaattataatctcatagaaccaaaaataaattatagaaactttttaaaaactgtcggccgggtgcggtggctcacacctgtaatcccagcactttgggaggctgaggtgggcggatcacctgaggtcaggagttcgagaccagcctggccaacatatagcaaaaccccgtctctactaaaaatacaataatgagctgggcatagtggcgcacgcctgtagtcccagctacttgggaagctgaggcaggagaatcacttgaacccagaagaaagaggttgcagtgagctgaaatcatgccactgcactgtagcctgggtgacagagcaggactccgtctctcaaaagacacacacacacacacacacacacacacacacacacacacacacaactgcgtggtttacaacaaacaagcatgatacaagtaggctgcttataatttttttttcttctcaagagttaacttgatataatttaaatggacatggaagaattgcaaaggaatcctaacttttaattaataaggcaactgaattttgacaaagggtaataagcaaaaagctggttttctacataattcagagttctcacaaaccacctatttgttttctctctctgctcaagaccccaaaatggtggctgtgtggcctgttctttggttggaaattaagttcttctaattgggaggctgaggcacgagaatcgcttgaacctgggaggtggaggttgcggtgagctgagatcgcaccactgcactccagcctgggcaatcgtttgagactctggctcaagaaaaaaaaaaaagttaaaaaaaaaagaagaacacttaaaattttactcccaaatgatcaggcaacagaaataagattcctcttatcttgtgtgtactacttctttttctcgtcttacatatttgtttattctcccatatcctgtgtcctacttctatctaacacaatgtaggctacgaagctcctcctcctcctccctaaactaccacatcacaaataatacatatatttatgtatttcggaagtaaattttcattagaagtataattattaatatacatttctgaacatgcatttatttatttaaaaaaattaaatatccagcctgagtactatgtactatttgctattttaagtaaagaaggtagcactatttaataaataaggcatatatcaattctactcctattcattgagattattcaacaatgattactcaattagactgcctctgatagtgttctccctatgatgtgtgctagaaaaaatcctggacattgtgagaggtaaaatagcatcagtctcatgtgccacaggaataaattttccaaaaatcttttaagacttcagcctccaagaaggcttaaaaatgttaaatatcatttaatttagtggtttaaaaaaaatctttgttgtgtgtagtaatgatgaatactaggttgcaaatttcatttaattaaatttcctgctactgttgagtacccacagaattatagcttgtgtaaggatattaaccaaccatgcaccttgtagaatatggtactgggaggttgattctgatagctctgatctgaaactttgaccccccccaccccgagttttaaaattaaaatggaaaaattatttttcaaatacaagatactgatctagcctacagatttcattattgtgataatccccaaaataatacagaacaagacacaaaccagtgatttttagcttagcaaagtgagcttggcattttatccttatgtcaaaacacaagactaggctttcagtgaaacagcagatgagaattctccctctgcagtattatcacatgcaccatcaattactgccatgcctaagtctagcatcatgccagcacattaagatagaaggtactctatgcagttttcactggaccagaaggacagaaataagaaagggaggtggagtccaggcgtggtggctcatgcctgtaatcctggcactttgggaggcccaggcagggggatcacccaaggtcaagagttcgagaccagcctggccaacatggtgaaacctcatctctgttaaaaatacaaaaattagccggggcatggtggtgggtgcctgtaatcccagctactcaggaggctgaggcaggagaatcgcttgaacccaggaggcagaggttgcagtgagccaagattgcaccactgggtgacagagcaaaagctgtctcaaaaacaacaacaacaacaacaacaacaacaacaacaaaaacgggcggggagcgagggagatggagagaaagaagagaagaaattttaaaaaggcagactgtgcaaaacaaaccagatcatggctgcttagctaatatgggccaactgctatggaagaaaaatgttgtacaccccaagttgtgtaagtttctataaacatctaaacacacacacaaacacacaaaacaccaacctaattaggaacattaatatatgttgatcctttactatgttacagttttgaaaataaaagctaaagttaaactatctgcactctctaaattgccttattttcctaagaagctagtgtttcttaagaggaagagggcttgtcatgatggttataatgattaagattccctctttgaccttttttccccactcaagttttaccaataactcactgaaacccttattaaatatgtgcacttaagcacaaacagtaaatgccaatgataatgacaatttcattttaacaatggatgtgttatttaaaaataatgtttttcaaaataaaaataatgttaaaaaatttagactttttttttttgagatagagtttcattcttgttgcccacgttggagtgcaatggtgtggtgtcagctcactgcaacctccagctcctggtttcaagggattctcctgcctcggcctcccaagtagctgggattacaggcgcccgccaccatgctcggttaatttttttgtatttttagtagagacggggtttcaccatgttggccaggttggtcttgaactcgtaacctcaagtgatccacccacctcagcctcccaaagtgttgggattacaggtgtaagctacagaacccagtcaaagtttttttttgttttgtttttaaactaagagccaggtaaataaatctccttgttctattgcttgatatcatcagtgtctaaaactaagcagtgtgaaaagatagaaataatcaacttttgacaaaaactagacatttcttaagccacagagcccaaacttgccatgtttcacaagagtctgataaataaaacttattactccttaactgtttcttctctttttttctttctttttttttcttttgagagggagattcattctgttgctcaggctggagtgcagtggaacaatttcgactaactgcaacctccacctcctgggttcaagcaattctcgttcctcagcttccagagtagctaggattacaggggtgtgccaccacgcccagctaatttttatatttttgtagagatggggttcaccacgttggccaggctgctctcaaattcccgacctcaggtgatccgcccacctcgaccccccaaagtgctgcaatacaggcatgagccactgcacccagcccttaactgtttctaatggaacttaaaatttttttttccatattctacttatgtaggaacatttcatacataattatgttgctcaggaaaggtgaatctataaaggatcaaaatacattttactcctttattcaattcacaaaatgctaaactttaacttgttaccttcaacaaaatattagtatgggccaaaaagatgtttttcccccatcaaaattctaatgtgtttttagattgttttggaccgatttcccaacatattaaatattagattacatcccaaactctatctggttactgtatggcatggaagaaaacaactctaaactgtattggttattaataagtttaacttcattcacattaagtgtcacacaaacactacctacctaactggctaagacccgaaattaagcaatgatccatcttatggattctgtaggcttgtcaagtgatgcttgttcagtttccaagtgtccttcgtcatgttgatcaaagtgattaccctgaaaaaaggatgatcacagctatttttcaagagcaataaatgtcaaatttattaacagcctaaccaaactaagagttatttttaagtttgtttttttgttgttgttgtttttttttttttttacctaaaaggagactgcaatcattctttttcagtagacaatcaaaaccacaccacaaattccaactttaaaaaatttataaaaacgtattagggctgggcacagtggctcacgcctgtaatcccagcactttgggaggccgaggcaggaagatcactcgaacccaagagttcaaaaccagcctgggcaacacagtgaaaacctgtttctggaaaaaaaaaattaattagccacacatggtggtgtgagcctgtagccccagctattcaggaggctgaggtgggaggatcacttgaacccaggaggtcgaggctgcagtgagctgtcatcaagccactgcactccaagcctgggtgacagaacgagaccctatttcaaacaaaacaaaacacaatttattaggaatctaggcccagtaatctgaacttttcttctaacaaatgttgaaattgtaaactaaaacactatcaaccatttgggacaccaattgtcttagactgactacattaggaagactatggactcttatgagctgcggcagagcgcgacccgttcccccagggccctccaagctcctcctgcccgggccggcaggtgagctggaggctccgggacaggcggcgccctccgccctgcacacacctagggccctgctgtgactgccccctggccagacccaggccttgaagcgtccccaccccatctcggtgactgacggcggcatcggcctctctcagccgggaccccgcccggccgctggatctcctggcccaagcctgccgggcctcgacgaaactccaccaagccgccggcacgcagcgcctttgggtggcagcgggagtggcgggccgggaagcctggcggccgcccgaacaccacccaacggaggacctgagggtgcagaggtcccgggaaggcggcctcgggacgcaggcaggctcggctgcctggttaggcctcggagccgcgcaaacccggtccccgtgaccgctctgtccccattggctgagaccacctagtcctgacctcaacggacaaaggccttaactggcctagaaggagaacggagttccgaacgacgaccggtagaacagttagcggccatcgggcggttggtcttagtgctactagaccttgctgctggaagagagaaatagtagaatgacaggccatgtttggcccgttggaaatgcccaccaccctttgggaagatttactggccgtttatagaaggcctgtgtatataatatgaaaaagcttctctcaactccaccccaaccttttaatagaaaatatttgccatatttagcccttctatagatggaaaaagccacgctgttttacttttataagcaatattgcattaaatttttaataatgaagaaaatccttcctgggtcgagtggggacttagagaacttttctgtcttacaagaggtttgtaaaatgcactcccaggcttttcaagaaattaaaaacaatctcttgacagtttccaaagcaactattcatcaagatgatctgcctagagagataaacatacccatataatactgtatttgatcataagcaagttgtcactgcaactaaaataagtaaaaacagtttcaacaaatgatagttgcagacaactaagaagttctctctaatcatagttttcacagatctccctgcttcattaggaaggaatagctcataatttggttctaaatcaaaatgtcaattttctggttcccttcttgcaatacagtatagggcatgaggatttgtgagtcccacaatgacctaagtcaaaagactaaagacttcagtcttttggtctagcctaaatgaattcagtgtgtggaatgatacgataaccggaatattaacaaaaagttactttgctttctcaaggtaaaattaaaattctaattgaggaattgcacatgtaccccagaacttaaagtataataaaaaaaaaaaggaaaaaaactggacttccctggggaaaaatccatttgatgatgtggcttcatcgagtattcctttgtgaattcctggatgaaattttcaaggcaaacaggaaaagcactgaaattgctgaatgggtgagcattgtatgcctgattcattaaatatatgcattggtaaatatataaaaaaattctaattgaataaataaaattcagtgatggggaactctagcatgtaatttgccacattgtatcataaatgttaagtttctctcactagactctgaagtcctcgaggacaagaactaagtcttgtttatcctttacaaacctaatacttaatatggcagccaaacactagggaacaattaggtgctaacattaagtggcaatgatgaacaagttctagaacaagatggtggtggtgatggtcatacaatattgttaatgtacttaatgccactaaactatatacttttgctttaagagaagggggtctcgctatgttgcccaggctgtcttcaaactcctgggctcaaggatcccaggctcagcctcctgactagccggaactacgggctccactacacgtggcttgaattatatactttaaaacagttaaagtgataaattttattacgtgtattttaccacataaaaataataaaaataaaattgtatggcaaagtctatccaaatgaagaaagggggaaaaaaggagaaaaatggaatagcaagggacaggagtatgttttccaaagaccaaaaaaaaataaaaattaaaaataaaaaaataaaaaaggacttatgagtagttatttcaggaataagaaaaagcactcatcaacaaatgatttttaaaaaatttaaaatagctattaatcctgaaagtctgtcttaaattaacctcaatattttgtccaatgattttttttaaataacacctgcttcttggcattttaatttctactacatttaaaattttaagttaatttaaaggtgttaattgcaaagtacttctaaattactaaataataaatattcaaatactgagattagctcaaaccttattatattatagaacaccaatgtacagccgaatatcaattctttcactctacaggtctatacaatttaatgataaaagaatagacgaggcacagtggctcacgcctgtaattctagcactttgggaggccgaagtgggagcattcattgctggaggccaggaagttggacttcagcttgggcaacatagcgagaccttgtctctacaaaaaaattagctgggtgtggtggcatgtgcctgtattcctagtcctatagtcctagctactcgggaggctgaggctcctgcctcacttcagcccaggggttcaagactgcagtgagctgatgaagccactgcactcaggcctaggtggcaaaccaagagtctgtcaaaaaaaaaaatccatcctaaaaacaataattgtgtactactttttaaaaagtaattaaacctttagtttgtttagagacagagtctctctctgctacccaggctggagtgcagtggggccatcatagcttactgtaaccttgaactcctgggctcaagcaatccttccacctcagctaggacaacaggaatgtaccaccatgcctggatatgttcttgatttttttttttttttttttttgagatggagtcttgctccatcacccaggctggagtgcagtggcgcgatctcggctcactgcatcctccaccaactgggttcaagcaactctcctgcctcagcctcctgagtaactgggatcacaggcatgcgccaccacagccaactacttttttttcttttctctttttttttttttttttttttggccaggcttgtctcaaactcttgatctcaggtgatccgcccacctcagcctcacagagtgctgggattacaggcctgagccaccgcacccgacctgtttttgatttttgtagagcggtctcactctgttgcccagatggtctcaaactcctgggctcaagtgatcctcctgcctctgcctctcaaaattctgggattacagatataagccatcaagtctggcctagaatatttaacttaggacaactacgtgatggtttttaaacaaaaagagaactgcccccaaatgtatcactatcaaagatgatataaagcacaaacagattattagagaactaccaagtaattctacaaaaaagaaaatgggcatcttctaggaaaaaccatttcagctcatccctactgcatgaaaaatcacacaagtttttccaaacagataatgagtcattagcaaaatcttcttttaatcttaggcttaaagttattttagaaaacccttctgtagattacaaactactgtcagcaaatgccaggttccaaataagacacttaacaaacttctaaatttgttagctaattaacttttcaaatcattctggatctgtcagatgcaatacaaatcaggattaataatatagttttagagttttagtccaaaaaaagacccacacatctatgattaatcttcaacaaaagtacaaagagaattcaacagagaaatgatagtgttttcaataaacgacactagaactcggtgtccatatgcaaaacaaaaaaagagcctcaatccatactttgaatcataataaaaaattaacttaaaatgcgctacagacctaaatgtaaaactgaaaatgaaatattctaaaagaaaaatacagaagaaaatctttgcgaccacaggctagacaaatattttcttagagacagcccaaaagcacaatatatgaaataaaaaattcataagctggactaggagaaaatatttacaaagcttattcctttaaaaaaaaatgtgttgattcctggctaacacagtaaaaccccgtctctactaaaaatacaaaaaattagccgggcgtggttgcaggtgcctgtagtcccagctactcgggaggctgaggcaggagaatggcctgaacccgggagacggagcttgcagtgagcctagattgcaccactgcactccagcctgggcgacagagctagactccatctcaaaaaaaaaaaaaaaaagtgttgatttagagtaactaaggctcacccaggctacaaggcagtggcacaatcacagctcactgcagcttctacttcctgggctcaattattcttctgactcagcctcccaggtagctgtgggactacaggtgtgcactagcacatctggctaatttttgttctttttggtgtgtgcgtgtgtggcttttttttgggggggggggtggggtagaaacagggttttgccatgttgcctatgtaaatgaaatgagaagaggctggttcatacaagacaatttttattttattcaagttaaccacggtaaagactgagttctttcacatccttgctcttgtccactcctctctctccattttttccatttcttttcttttcttttttctttttttttttttaacagcgtgtgttacccaggctgttttcaaactcttgggcccaagcagtcctggtgcctcagcctccagagtagctgggattacaggcccacagtcttttaaaggtaattagcactgttaaaattatgcccattaaggacatttttttgtaagatgcttttcttgagacatttttgttagactgaacacacaggcagaacttaaaaaaaaatttttttttgtaagaactttaatcttacctctagatacattatctagtctgacagcctggtcacaggtgaggaaaggttgtgctagcaatgtctttaattttttagtacattgtggccccttttattaaaatatactattaaacacaaataatacaaatgtaaaacagatgttgttaaaagttcacgctacactgtaacaagtaaaaactgaaagaaagccctcctttctcctctgtttcatttcttagaggtaaccattgttttcaatttgttaccagttttttagtaaagttttaaaattttaaaatacacatgctgtttggaagatgtgcttcagaaatattgcatatgagtttattgtaattattaacttttgttttgtttacttttatataaatagactttatttttttcaagtagctttaggttcacagcaaatttgagctgaaagtaaagacatggcctcctacacatttgttataatacatttgttacaatagatgaaaggtccacttctggtgtagttctatgcattttggaaaatgtatagtgacatttatctatcattatagtatcatagagaataatttcactgctcaaaaaatccccagtgtcacctgttcatccctttactttcttcccttcaaattcctggcaagtactgatctttttactgtttccgtagttttgccttttctaggatgccatatatttccaatcgttatgtagccttttcagattggcttctttcacatactgctgaatatgtatccaagattcctccatgtctctcctggcttgatagctcatttctttttagccataaataatactccactgtctggcatatcacagtttgcttatctattcacctaccaaaggacacctgaattgctgccaagttttggcaattatgaataaagaatgctataaatattggtgttttggtttttgggtagacataaattttcagctcctttagttaaatactaaggagtgtgattgctggattgaacggtaaaaataggtttaacttcgtaagaaactgccaaagtgtcttgtcttccctttgacagtgtcttttgcagagtagaagttttaaattttaataaagtctaacttaccaattccttctttcatgggtgtgcctttggttttccaattaaaaagtcatcactaaccccagtgacacctagtattttgtttgcttttacttggtgttcgtgtcattgtgatgagactacatttattttagcagtaggaggaaaaagttttgtgcttcactaccagggattactatgattgttgtgatactgtgattgtttacttttgtgggagttgatggtgtttatgtttttgcattaacgttaaagaaatcaattagcctttttaatagggtaactttaattcagcttaaatctgcaaatttgtgggattttagaccaagaaatggcctgaaagagtgtctagttcaagttcattttacaaatgaaggtacaaagaatgaggaatatgacatgatttgcatgaggtcatacagtgaattattaatgaagacaggacttagaattgctgataaccattttaaagaactgaaagatgtattgataatttttcttgtataataaataattttgatgatgtgtttatttcttattctttttgacttggtgttgtggctcctaatttttaaaagggtaagttttaaaacagtgaaaaatataaacagtttttatacttttcaaggaatctacgatctagtgggaaatatgtccagagacatgggctccaatcagtgttgctcagtggaaagggacaaactttcggaaacaggttcagaggatgtaacagtgccaccaaatagaggcaattgggggcgggggtagggtggccttcagccaaatagtaaaatacatagagatgggggaggtaagcaggggtggggtgagaagggtgggtgcattttaagtagacagaaaagtgaagcaaaagttgagaggtgaagaaagagctttgtacagttgctgccaaagaggcaagtggccaatttggcatggcctgctccaagtacctttcagctggggttacaatgctagaattcgctttctgccatcattgggtccactgttaggctaatggtgtttgtcttgtcacaatataaatacttttttaaaggcactaaacattgttctcataaggacagggtcattctttccacactgttgtcttcctcagttgacctctcttagagccatttgcattctaagacttatctgacctcatcaaattaagagctatggtcccctactaaagaaatttcaaacagctggacagaatgtttttggacagaggaaccatccactgaaagtgcttggccttgaaaatctttataggtaacaaatttggctaggtgacatttggggttttttgttttgaggcagggtctcactctgttacccaggcaggagtgtagtagtgtgatcactcctgggttcaaaccatcctcccacctcagcctcttgagtagctgggactataggtgcgtaccaccacatcggctaatttttgttatagaaatgggggtctcactatgttgccagggctggatgagatgttttctgagaaactgtcacattgacacctgtacttaccacatttcctggacaaatcctagcccacactcctccggccccattgccctccagcaagcagttataattaagttctacagggaacttaattataacttcctaagggaaggggaagctgggtggagcgcagagcacacacctaacccaccccaaggtaaattaaaaggatatggtaccaccatatccttaaagccataatggatggagggtgggagcagtgctgccaggcctctccagctgtgtagtgtgccaacctagccagacctctcctgggccctgggtttggtctgaagaccctgtgcgggaaggcactgctctgccctagggatagaagacttggcctggggctgggcgttaggataccagggttccagtccctgccttgtcactcactttgtgacctcggacaaacacctctctgagtctcagtttcctcatgaggtgttaggccctagatatctacaaaggccctcccagctcttcatgttccatttttttttttttttttttgagacggagtctcactctgtcactcaggctagagtgcagtggtgcgatcctggctcattgcaacctccacctcccaggttcaagtgattctcctgcctcagcttcccatgtagctaggactacaggtgcacgccactatgcctggctaatttttgtatttttagtagagatggattttcaccatgttggccaggccagtcttgaactcctgacctcaggtgatccacccacctcagcctcctaaagtgctgggattacagtcctgagtcaccatgcccagccttttttttttttctgagacagagttttgttctgtcgcccaggctggagtgcaatggtgctatcatgactctgcaacctctgcctcctaggttcaagtgattctcctgcctcagtctcctgagtagcggggactgtaggtgtgcaccaccatgcctggctaacttttgtacttttagtagagtttgggtttcaccatgttggtgaggctggtctggaactcctgacctcaggtaatccacctgccttggcctctgctgggattacacgtgtgaaccattgcgcccagccttcatgttctcattcaagtgaatggtttggagaagtgagagaggagctgtatacaaaagtcccccttatccgtgggggaacatgttccaagacccccagtggaggcctgaaaccataggtagtactgaaccatattgttttttcctatacatacaaacctatgataaagtttaatttataaatcaagcacagtaagacattaacaataaaatagaacaagtataacaatatactgtaataaatagtatgtgaatgtgctctctctcaaaatatcttactgttctctagatcttagcaacctcagcattatttcctaaatcaaaaatcttcaccttttcacataaaggaactttatggtttctcattggcatatccgaattgtcacatcgctaccattgcactttagggcctttgagaggggtctcactgttgtggaggctggagtgcagtgaggtgatcacagctcactgctgcctcaaactcctgggctcaagagatcctcccacctcagcctcctaagtagctgggactacaggcaagccaccatgcccagctaatttttttttaagagatggggtcttgctatgttgcccaggctggtcttaaactcctggcctcaaggggtcctcctgcctcggcctcccaaagtgattacaggtatgagccaccacacctggcccactattaaataacataaggcttacttgaacacaagcaccgtgataactcaatggtcaatttgataaccaagatggctactaagtgactaacaggagtagttagtctgggaacagagtggagtctgagaaagagcaaactgcctttaaagatttatggtgtgaacaaaatgggctctctcctcaggtgacctaaggtttcccaggcattgactttttttttttttcctggaaaaaaagcagcagctaattctgagtcctccctcctgagcccctggtagagtgttctctccatggagcccggctcccccctcggagcaggacaaacagccctgaacacccctgcctccctgtggctgccggctctgtggtcctgggcaaggctgacctgagacttgggggacgccagaactgtgtgccctcacgatgctcagccacccatgctgttcatcccctgctccccacccaaagacctccacatttctcctactgtctccttccaacctgctcctcctcctctccagccaaacccctccactgttacctcccccagtaactggcacttggctgaggactcagcttccccacagccctctccagcgcaggctattcaccttctcgcacccttcaaggtcaggataagcggcctcctccctccgcaaggccatgtccacacagtttcccctccactctcatcccatgctcaccttccttctggttactcccccgtgtgcagtggcattttcgccaccaccaccctgggtggccttcccttgacctcatctccaaagaccttcccctccactccatttcagccgcacactcccacgggcagaacctcttcctgaccccaggaattcaggtattgcacgccctcctcataagctcccacccttccggcccagtgactcccatcacgctggcacgtgttcctcagcaggcctccactgtctccctgtcttacagccccctttggcctcacctctccctctccccctacctagcttgaactgcaaccttctgcacctcaatcactcttcttcagctcttcaaagccacctttcgcttttctgaacccaaactctgtaggggtccaacagccttcttctgggtagaccccgcactagagaaatgcaaagcacacagcctaagagattggggcctccgggtcagcggccccccacctcagctgggccttcaacactgccataatccctctgtcctagcccacagcgccccaagggaaggggaagctgggcggagcgcagtgcacccacctaacccaccccaatccttccattccctccgcctcctccagggctttgagccgcatttcctgctcttctcgagtaggggtaacctctcccactgtcaaaactaaactagctcaagtctttctcacctgcaaaataaactctcgagtgcatctctctccagctactgccccatgtcttctccccttcgtgaccagctgtctacacttcctgcctccatttccccactttcttactccctggctcctgcccccacgacacaactgttccccacagggccacaggcgggcatcactcagtgttgacaggctgcccctccctgtgacatagccccctgctagtacgctcctatctcagtcccctcctcccatgacctgaggctggagctcccccaggatctctcccaggccctctgctcgccatcaaaggcggatgcctcacaagcttacgactccagacaggctcacccaactgcctcctccacccaacgctgcagcccactcaaggtccacgtagtccaagctgcattccttcctcgcactcccttgccctgtgtcccctcttagcaaatggcagcctcggcgatcctgccccgagacaggcctgcgcccagcgtggagatgaacatcagtatttgctgaacgtgtaaacgaatccttgaccttccctcatgctccacagccggtgaggattcctgtccattttactgcctcctacgtccctcgagtcctcccctctgcttctttgttcaccgcggccagctgcctccccagacccgcaaccccggctgggccgggaacctgcaccgcggcgctcgtgccccgctctgcgacccctgctccgtgacggccgcactgcaccggggtaccgcggcccagcacaggcgctggtcactagtacacgaactagctaggactacaggtgcacaccaccacacctggctaattttttattttttgtagagataatgtcttactaagttacccaggctggtcttctgggctcaagccatcctcctgcctcgggctcccaaagtgcagacattacaggcatgacccaccgtgcacagcgtcagctttatttttttaatgctgacttactgcagaaggcccaagggccagtgcagttttcatactgctgttgtagtggcgaacggagccacgagggaagggagcgccgccggcagctgccgggacaccaggataccacgcggccagcaccgaaacgctaggctcgcgctcacaaccgcaatctacactgagtagccgcgcgccgaacggcgtgactaagccccgcccacacggcgctcctggcggccaatggaaatggcttacgagacgccttctccacgcgctatacttatacggaccaatgggtgcgccctgtggggagtgccgccccctgtccacgagcctcctcttctcgccagccaatggaagcggtctgcctagccctcgcgggggcaaggcggcgaccgaggcgcgtgggtctgggaaggcgcgcggatttggcccctcttctcacatcagcgggtccaggcccaaccgacagactatgggggctccggcaaccaggcgctgcgtggagtggctgctgggcctctacttcctcagccacatccccatcaccctgttcatggacctgcaggcggtgctgccgcgcgagctctacccagtcgaggtgaggggcgcccctcttatcccggcccgctgaggctctcccggcgctgcgtccacagggccttcacctcctccgcgctcgcgcactctgggttccagttgcctctctcgggtcctgcccatgcctcccccgctcctaacccaactttagttcggtgttttcctcgggctttgtctctatcccagccccttctcccaagcggcgggggcgaacgctttgtttcctttaaagtcacttcttccctgggtttaaggtttcccgcgattccacctctggccggttgtcagtgtctgagggaagtagtctggatgaagtggtgtccaaagtcacatgttaggtttgctttaagcttctggttttttgtttgtttgtttggaagggctttaaaataccagtctgatcccaaagaaaaaatccgagtagaaatagacctgtctgaaggtttagcaccttggttggtgcagctggggcgttcacagatcgtcactgcttcgagatcaggttccagcaacttccagagctcaggagtaaattgccatcttttcagattggctcttcaatattgggttcgagtaacaatgatctcctgagtaaaaataaaggtgaaaatcccgatttcctggttgttggagagcattctttcaaccccaaactctgctttaatgctttgtttttttcttcaaagctatagttttagtttcccggttcgttgaggtttttttctcgtatctggaccctgtgaccttcttccatggaattcctgtcctcagttttgtttctccatcttatctataactgtaggcaggactgacttgtctacccgaagattttattttgcgtctgtttttccttaaatgctttttatctgccgaggaggggttctttacctgagggtcatgaactcccaaaaatgggtgcaagtgtgtgtgccttttgtttcctgcaaggagaatatagcttccatcgacttttcaaggggcctaactctcccaaaaaggccacggctcaagaatgttctaccactcccataagtcactcttttttgtttgcttctagaaccaaacacaactggaagacctctgacctccttttgcatgggaaaagcgtaggtagcgtgtagcaagttgcagtctggggacttggttcttccaagaactggaggtgacttgggcaggtcagggctctatatcctcctcaactgttgagagagttgagttaaattataagctcaaacatatacagggtgggttagttttcatattgctgttgtagttaccacaaatgtagtgatttaacagatttatttgtttacagttctggaggccagaagttcacaatgaaatcttacagtgctcaaatcaaggcagggctcactccttctgagggctccaggggagaatctggttcttgcctcttccattttctggtggctgccaatgttccttggcttgtgttcacgtcacttcaatctctgcttcgggtcatcacattgcctccctttctgtagtcagagttccctctgcttcgcttttataaagacacttgtcatacattcagggcccaccagataacccagaaaatctcccatttcaaaatccttaattacatctgcaaagtcccttttgccaaataaagtaatagtcacaggttccagggattaggatgtggttatctttgggggccattattcagcctactacagggccagagagtacagactcttcccaaagaccgaagaggtcatcgcagctctgcagtaaccattaattgccctgaagaaaggaaaatctactacagtgttggcctatctgtggtttttgaaacctgtgtggccagcaatactcagacaggctgcctgtttacaatctctggtgttataggaccttttaatacttggtaattagcctgctactccatgtagccattccagacttcacagctgttgtcttctttatccttcctggatgtgccattctcacaagcccgtcttgctcacccctaacaaaatacacttaaaaggtgctcagcatcatatcataaagatcccatttaaatgtttacatttgataaaattttctcagtcttttttttagaaacagggtcctttgtcacccaggcttggcgtgctgtgatgcagtcatggcttaccacagccttgaacctgagcacaagagatcctcccacctgtctcctgagtagctaggactataggtgcacaccaccacacctggctaattttttattttttgtagagatgatgtcttactgtgttacccaggctggtcttctgggctcaagccatcctcctgcctcgggctcccaaagtgctgagattacaggtgtgacccaccgtgcccagcgtcagctttatttttttaatgctgacttactgcagaaggcccaagggccagtgcaggcagcatctggccagaacctgtgtgtgtgtgtgtgtgtgtgtgtgtgtgtgtgtgtgtgtgtttgtgtgagatttaggcattagcacgggcatcctgggtgtgtgtgtatctgtgtgtgtgatgatgtttgaaggcattagctcggtggcatcctggcatggaaggtctgtgcctccattcttgttgctttggtgtaggaaatgctgattttgttgcttctctatggggcaaataataataaacgccttgagttattctcatattctctttgaaaaatgccaaaatttaacatctgtcattttcttcctgaaatagaaggaatgtttccctagagttaaaaaacctgtaggagatcacctagtggttgggctgaaacatgcacaataaattttttttcttggattgcaccaaatcactgcttggaaaaactcatttttttatttactttttgtttttctttcttttttttttttgattttgtttttgagacagtctcttgtcgcccaggctgtagtgcagtggtgcaatctcggctcactgcaacctctgcctctcgggttcaagcaattctcctgcctcagcatcccaaatagctgggattacaggtgcttgccacaacgcctggctaatttttatattttgttatagatggtgtttcaccatgttggccaggctggtctcaaactcctgacctcaagcgatctgcatgcctcagcctcccaaagtgctgggattacaggtgtgaaccaccacgcctggcctggaaaaactcttattttattatgaaacagtaagaatttagtttggataagaacatggtaaggagaggatgggaagcattttgtagtatcatttgcagctgggtaacattgcttctggtaaaaataaggaaaaacaagtgagcatctggctctgaaatcagtctgtgttcccattctaaattatagaagtacaagattggtgagtagcaaccactggtttagagatcgtgcgtgcaggccaggtgaatcttttatgtataacaagggtgggttgagtcaaatagagtcaggtataagtggaaacagtttcattacctttggtagggaggccataactaataatttttaatgaccagtcgtgagctgcgattttaatgggattaaacttgaatatctccaaatatgtattaattacattcaattaatcattatgtgctagccattattttaaagactacatgtattaagtcactctcttaccaatagtgaagtaggcactattactggctctattttattgatggggacacaagtgtagggagattaaaggccttgcctaaagccaggcactctaccccaggtcctacacgcctcacccatctgccaggtgcctgggctttctactctcctactcacaattagtcccagcctcattctggcatcaggtggcaggtatatgactgtgggcagatggttggttacgattatgataattcattattacgacatctgggtgattgttttttaaattttgctgatctcatcttgtaggccttagaaattaaagtgctgtacaagtctgcctcagtttatgaaatagttggatcagagaggttgtaaacaaattgaatagaaagtgaagttcaaatggccagaatgcctttttttttttttaatttttttttgagatggagtctcgctctgtcacccaggccggagtgcagtggctcgatctcggctcactgcaacctcagcctccagagttgctaggattacaggcgtgagccaccacacccagctaatttttgtatttttagtagagacgaggtttcaccatgttggccaggctggtctcaaactcctgacctcaggtgatccacccgccttgacctcccaaagtgctgggattataggcatgagccaccgggcctggcccagaatgcctcttaaattttgcagtcaggccgggtgcagtggctcacacctgtaatcccagcactttgggaggctgaagcgaggatcgcttgtgcccaggagttcgaaaccagcctgggcaatgtggcaaaaccccgtctctacagaaaattagctgggcttggtggcgcatacctgtagtcccagctactggggaagctgaggtgacagaatcatctgagcccgggatgttgaggctgcagtgggccgagatcaaatcaccacactccaccagcctgggcaacagagactgtctcaaaaaaaataataataattttatagtcaatcttttaaagcaggtagtgtcatccagtatttttaaaaatctaaaaagcaaaaaagggatcttaagaaaacatctagtccaagttgctcattttacagatgaggaagtagaaccctggagagggacagtgacttagcctttgtgtttcttatcaattcaatcctattcaaaccacattcccatccagaaaagtgcttagaaggaagcgaagggcattgctatgaatttcaatttcaaattaagtacaaatttggatatcctttggtcaataaattggttatctagccaaagcctttctgaaattaataatatgctaacaggatatttgtttctggatgtttgcttaaagtgctcttgcagcagtggggcttctatttcacaatagcgaggctttatcttttgattaaaaattaacaggaaaaatattcttggattttccattgtaagtaagataaattcttaccctggagttgcctttattaatcataatatcaagacttatttgtctttgaaggcctgtgtgtcagggcagcgccacatctaggaggttaaatgtgacaaacgtttagtagtccacatagagccaagagcactaggctttgggctcctataaaagcccaagatgggaagccttaaactctgcttcttttctctgcctgtagccaggtcagcatggatccgcatcctttttatttgacaaggtaattacaagcgtggggcccaagctagaactgagacgctaaaaccctgcataaccaagaagctactaggtagtttgtagtttggggcagagtttgttcttccactaaaatcctgtctcctaaaataaaccaaaaattagaattaggggagttaaggaacttgtttgtcatattggaattaaagtgtccaaaattacatcgccacagaggttagatttacttcccctttcactcccacccccaccccgcaaaaagaagagggaaattcaattcatttctgcatttgagggaatctggcctttggaggagtttggtgtgtagttgccattacaaaagggaaagtgtcaggatggttttcatgtgtatttgtttttttaaacaaagaatgatattgttgacagaaatgtcacatttgttcattcagcgaacaccctgagtgcctaccaagtgccagatacttattgttgctcctgacagtggccaacacacctggatgtgttatcttggaattatgaacagattctgggtaacacaaagaaggggctggaagagttgagaaaatttcagagaagggaacatttgagttagggatagtaagtttttattaaatgaccacctaggctgtgtcacaaaagccagctggacatgccatctgctgccggggtagtggggggtggctaattaatgacaggctcctccagtgtattttcaaatgagctagcgccgagcctgttgagggcaagtggctgtaattcatcatgatcgttttctttttcagtttagaaacctgctgaagtggtatgctaaggagttcaaagacccactgctacaggagcccccagcctggtttaagtcctttctgttttgcgagcttgtgtttcagctgcctttctttcccattgcaacgtatgccttcctcaaaggttggtaaatggtgggaaaatcccatttttactcagaaatcaggtcccagaaatcttttgggaaagtatctccaaagggaaggggatggtccccatagtttgtgggagaatgctacaggatctggggtaaatagccagggtagatcttgtaaagggacattagtgtggctcaggctcatgtctgtggtcagcaggcctgcacggctgcctcagtcgtctggaaatcccttgcatacacatgaagcctgagaccacttaaacaatgagcttgttcccttttgttttgttccccaacagaattaatttctctttttgttggcttttatttctctgcgttggatagtatcatactgacttataagctgtagcatcaggctaatccctaatgtgcttctcattttaaaattattcttagtgttctcatataatcaatgcttttttaaaaaggtgaccatacacgtgtacttgataagctaaaaccactgaaaatgctcgtttcccattggcaccccctggggtcactgaatctgccttctgatcctctcacctatatataattactgaacaaacagatgccatggggcagggatttccctccccttggattttgtaccacacaggtttaaccggtaatggcagttttattgccctagagcttttccgagttatgttctgacccccattcttggttctttggcgagctgtcggtgagctgtcacgtaagtctgcatgttgggcagtgtggcacatccaggtttccagttccgagtttccacttggagaagggagtagaagaaagcaggcaggcagagacagtgggaaggtcatggacacctttgagtcatgaacagacctaaccatttttcttttcccctgactacctcaggaagctgcaagtggattcgaactcctgcaatcatctactctgttcacaccatgacaaccttaattccgatactctccacatttctgtttgaggatttctccaaagccagtggtttcaagggacaaagacctgagactttgcatgaacggttaacccttgtgtctgtctatgccccctacttactcatcccattcatacttttaattttcatgttgcggagcccctactacaagtatgaagagaaaagaaaaaaaaaatgaaggaaacaaccactggcccagggtagagatgcctacagggtggttgcttgttggatacaatacaaggaacactgctcagaacccacgtcttcagcagcatttgaaacactggcagcaatgcacaagagcaagatggtgtcaggaaccatgtcaaaccctcaccttcttccattttttttttttttttaagacagtctcactctgttgcccaggctggagtaaagggcagtggcatgatctcggctcactgcaacctccgcctcctgggctcaagccatcttccttagcctcccaagtagctagaactacaggtgtgtaccaacacgtatggctaatttgttttgttttttttgtgtgtgtggagacagggttttgccatgttgcccaggttggtctcgaacgcctaggctcaagtgatctgcccacctcagtctccctaagtgctgggattacagacgtgaaccactgggcccagcccaaaccttcaccttctaagggcactgggatgaacagaccgatcggcttgagggtgggcaaaggggtgtgggctaggttataaggaagtggtaccaaataactgtgtgcctgagttccaccgcaagattactaaaagcaggaccagaccagaaactgctaaagaacatggcctgtttgacatgttcatgagtcacctgacccacagcatatatgcttatgactaaaccctccactcctgattctcaagagtgtatcacctgtcagcaaaatgaatagtgggatattttgggccattttaaatgtgaaattttgcctctttaatgttaattcaaaactatatcaatgttttcttgttcccacctctaacccaaggaaaaaagagaaaacatactatgcaaaggaagtttaaacttaagttttccttaagggtcagcccaacaatgactttcagtcaaatggattaaactggaaaatgtttttgtttctgttgtaaacagatcatcctaggcgaaagttttttttgtttgtttgcttttaaattagtttatttctaaatcttagtcttccacatttctagaggccacctgacacaagtccctgtatctgaagtctagcatctcaaggctgatctggaagtgtgctagtatgctccctagtggataacttaatcttttaatacagttccgtcattcccatcttgttttcagaagagaaggtggctacagccaggcataacatatccactgtgtgcatagagggtctcttcacgttgatgcttggcattccatcagctttctctaagtctttgctcaagttcaaccttaaaatgatgttagacaacaggtcccagtcagttccctctattttcacccattttgctcacaagccatattggcccgattagtggtactgtctgactcacgtgtgtgatccaaataaaggtagctgctgaccactgcctggtttgttttgtggactaggggatagagaatccagggttctctcatgaggagttaaacatatttcaagagcaacaggaaaaaaggtacatcaagccatttgaaaacaaaaatttattgcttctccttccaaagctttgtgaatttacaaaaaaaaggatgaaagtttacaaactgcttagttccaactaagcataagaggtgagaacgtacactgcagggccaccagcagcagctgtgcactgatgttaaaactggctcccccagacttgtagtgctgtcttcagggggctgcattccttacacgccacctcttgtgacataggtcattggtcaagccgctggaatgctacagaggtttttttggttttgagaggcttttttttgttttgccttcctactataaaagcgaaattttcagttcatttctgaaaaataaattggtcaataaattcattttgttctgcttctactttacacaaagcttcatattcaacccgatacctgaaaaacaaaattgttagaggccctgaaaaaaagatgaagtaaaccacagacctaattcttctagagaaggatatagaggtttaaatgatttcaagaaatggtgtgagttcagaatgaagaaagaaagaggcaaagccctacccagagccacccatgagaaatctccagccctaggaaagtcttctttcagagagccagccaacttcgtggaccctttcatgctcaaactactagaggtggtttgatattaacaagttttctatttccttcccatcaaatgtaattttattttttaaaatcttcaaatcaggatgacaagtgagatgctattcctgggaaaacaatgatgaagaataaggacaagaagtgatcattccagaaggaagagtggaaattcagctgtgtaaagaacttgctttacatcatgacttcttacctttctagctgcattttcttttctgctattagggcttgaagttgctgctgttgagcttctctctgctttgctatagatttgagcaagttccgagcaccgatggcctacagtattgccagagaaggccatggcttcattaaaaccatctacagcatcaagtcctcaaagtggggaggggttatctgggagctgtgtcagtcttcagagaggaaaagaaagtggagccccaaagcttttgggttaagtcagaaggattaacctactgatcacaaagtgcctcaagaactagacggcagctttgaggcaggtctaggagtattcctagagccagggacacaggcacaatagcacatttggtggtgccattcagccttgtgcctttcaccaatcatactatgtaagccttcatttcttcatttataaaatgaggataagaccatctacatcagtgctgatatgaagatgaaacgaggccaggtgtggtggctcacacctgcaatcccagcactttgggaggccaaggtaggcagttcacttgaggccaggagtttgcaaccagcctggccaacatggtgaaaccccatctttactaaaaatacaaaaaaatggccgggcgcagtcactcacgccttaatcccagcactttgggaggctgaggcgggcggatcacctaaggttgggagtttgagaccagcctgaccaacatggagaaaccctgtctctactaaaaatacaaaattagccaggcatggtggcacatgcctgtaatcccagctactcgggaggctgaggcaggagaatcgcttgaacccaggaggcggaggttgcagtgagccaagatcgcaccattgcactccagcctgggcaacgagagaaaactccgtctcaaaaaaaaaaaaaaaaatacaaaaacctcagctgggtgtggtggcacacacctgtagtcccacctactcgggagggtgaggtgggagaatcgcttgaatctgagaggcagagcttgcagtgagccgagattgcaccagtgcactccagcctgggtgacacagcaagactctgtctcaaaaaaaaaaaaaaaataaagattaaaggaaataaagattggcaaaagttcagtaggttaagtggaccagaagttattaaaatcttaaataaaaattcacccacccagccctctacccctctaaataaatcaagagggaagagggatgagagggtagtgaactagggtcccaggccaagatgtaggcggaagacatgctgatcttaccttcatcttttcattttctgcttcttttgcaagttgatcaacaagctcaattaaaccaccaactattttctgaaactggccaatttcttttaggaaaagaacaaaaaataaaatatttccttagtatcatcactccccttcggtagagtgctaaggcagtgagagggcagagcggactgccccttctaatttgtgttaaaatagttcggtgtgggccaggcgtggtggagagcaactgtagtcccagctactcagggggctgaggtgggaggatcacttgaacccaggagttagaggatgtgtgatcatgcctgtgaactgccactgcattccagcctggggaacatagcaagaccctgtcgcttaaacactttggtgcctgttggcctgtctcctacccttggtctgaacctagagaagggtggccagctggaccagggcatactcggaccttgcatccccactgagccagccagccgctatgacctccggctatgaaagcactaggcccttgctgggctcattctccagacagaccccaaccctgcttccccaggagtgacaggaagcactgttgttcacaaaagggcagcctcaggacacaagcgctgcctctggactagctacaggtatgacaccagatttcaattaacagtggggatgggggcttcccacttgtaaccacaaaaaagcaagctcacagcattaagtgcctaatctcccactcactttctccaatgtcctggatgtgacaatttactgaggggaaactaaggcccagagaggtgtgtgcatggcacagcaatcacaggttagtgacagaacccaagctacctttcactaaccaagctctctccacaacctaggaaaccccccagaaagctcagaagtcccttgttctagctagatctggctctgtacgggcattgggcttgcttggctgctgggacaggaggcttcctgaagatttccagccaaaagatgacttcagtaagtctgttgagctgcttctagaaacttcacctatcacttctaactccaaataacagagaacctgcccctgagaagactttctctgaagaaatcaaatcatgagtacataattctatttcccacacccaagccatggttgtgttcccagaaagtttaaggtttctaagagcaagaaatgaaagatggcatatctaaagacaccctcccctccccatcccggtgtttggtttgactggtgccctgttggggacacatgagagcacaagagggcagacagaaaagggtggcacgtgggaactcacagacgccagattcaacctccagggagccagcagctccactgtggcagggccaagatgagcctggggtacagttgaaatggcagctcaaagctgagtggcactgtatctccccaatactcactgtccacaaagtctttgcactcttccttcagctctatggtctgctgggtaacctctgggtccaacaccctcagcttgttcagttcatcaaagtgtagccctgcttcacccaggatgtccttggccatggctgtaaagaaacaggcccaattcctcatcacttcccagccacccaaggaaatgcctgctgccaagccagccccactcctgcccttggacaccaatgccaaaaacccaggtgttccaaaggatccccgttccctctgccaccacctctctgagcctcacctgtttcccatccaggttccctagaggagttctgctctgaaggagtgacagtggcagtcaggaggaggtgtgtcataggagcaagggtcaggaaagaataaagtccgcttgcttgtcacaggcatcgttcattcaacacacatttcttgagtgcctactacatgccaacactgctagatgctgggggtacaaagatgaatgcaacacggtgcccgccctgaagagcacatagttcagctggaagaagacagacacggaaactgaaaaaccacactgcgttaaatgcttgtttagaaacatcagtaaagagccagaggaggacagagccattaatgaaggagtgacatgtgaactaagttgtaagccatcagtgtatttactttatatatcaccagttatgtactgaaaagcacatgaaaaggcttctcaaatacatatactggaacaacacaaaaaccaaataaaggaaatccgagtaaattaaaaattatggttaaaaaataaaaagtcaggagtaagaatattactcaaaacgtatgcttgcctgaattgggaatcaaagttgggtcattctcttcctagcagaaaacacaaaaaggaatgaagtatcagcaagaacatatcaaggcaggagaacagggataggtattccaagcagagaaaacagcatggacaaaggcctgaagtcactgaaaggacctatctcacctaaggacgagaggaaaaagaatggagctggaaaggtgagctggagccagaccaggaagaccctgcatgccaagctaaggagtttggattttttctgtaggcaacagagaactaacagagatatcttctcccttaccaagccaccttgcattcctgttccaaaggatgcctcaattctaggaaggaaatactgaaaactcactcttgttctggctcaaaacacacacacacacacacacacacacacacacacaattaaacatagacatctttatgacctgtttaaaaagggaggcaatgctacttacatctagcaattggctgctatgccaattctaaaacccaggtgctccaaagtctaccatcacctggacttgcaccagccccttccctctgcccccactgcccccagcctcagctgtttcccttctggcttccttagagaagtcctgttctgaatggggtgattctggggttggctgtccagggcaggtgtgccaaggaggagcaatggctggaaaataatcaagtctcactgtttccagaacttctggtttttaagatgaccagaaatccagtacctcaatgttggtatgtaatccaaaaattttaagtaagggggaaaacccacatccaacactgcatgggccaactaatacatgtctatgagctgtctgtagacgactctggcctttggcctcactggaatccactgatgtaagtgagctagcatcatccttttgaagcattttgttcatctgtagcttccttaaaatagggctttttaaaaagatctggccagtgcagtagctcatgcctgtaatcccagcactttgggagactgaggtgggaggatcacttgggcacaggagtctgaaaccagcctgggcaatgtggcaaaataccgtctctacaaaagatttctaagatagccagacctggtgacaggtgcctgtagtcccagctacttgggagggtaagctgggaggatcgcttaagcccaggaggtggaggctgcagtgagccgtgttcacaccactgcactccagcctgggcaacagagtgagaccctgtctcaaaaaaaaaaccaaaaaatctgtctttcgcagctacaggtcattaatctgaccagctgctccagaaagattgaagtaacatgagggagcaaatatctgcttcaacttccacccccttccctgagagcatgcatttattcagaaacatccactcagtccctgctctggggacagactagtgaaaacaatgcctctggacagatggtaaagaaataatcacaaatcgtgatattactataaggaaaagtacatggtgctgtgtgaagtgctgcaggaggacacagttcatggggggcggacttggaggggagggccaacagaggccttctgaaaaaaatgacacttaaacagacctaaagactgtccaaaagtatgtcaagtgaaaggggaagcaaggcattgcaggcagaaggaaacacgtatgtgaagatcctgaggcaacaggaaatttgatgcattccgagaacagagactgagcaagagaagggaacagaatgaggctagacagggagacaacagctggatcaccgaaggctctgaaagacgcagtcatgagcttggattttatcagaagggtaatgggacagccagcgggttctcagcagaccaacaaaatcagacttagaaagatcactcttgctcagcctgagagaaccgattggagggaacaagagagggcaaagccccaagtaccttcttgttcatcactctaaccctagcacctagcatggtgcccacacataactggcactcagtaaatgtttgtggaatgaatgaccgtggaaacaggagactattgcagtaaccaaggctggcagccgaacacaagtgttccgagttgagatgttttgtaagtcgaggtgatggggcttagcaatggactgactgaatgtgggggtttggggataagagaaaaacaagtcaggcatgactcccatgaatctggcttggcccacctatctgattggaagggctggcttaaagagataggtaagatggaagaagaggtgcagggaaagagttcacagattatctaccaactcccatcacacgcgtgtctgagcatctgagcaacacctggcccaagagctgggactaagctccctgagcatgaggcggtggcatactttctgcgccccggctctcccagatgcatgcgaggcactgcgagccgactctttactatgtaaactccccgaacttatccgagccgcagtttcctcgtaagatcgtggcaagcatcaacgcatcaaactccaggcctaagctgggtgtgaaagcgcccccctgagagtggggcggaattcccacgtctctccccgcccggtactgcctttcctcaggacgcgggcctgtcaggctcctctcgcccctggtccgcccgcgtcccccgacccgaggtcagcctacctgccggccccgcggcggcagcgcgctgcagcccaggctgatgtagacaggcagcttctcctgggtcagcgacagccggtacccagccagcctgccacggccgctgccacggatacagagcctgtttacctatgacgtcactaccttcctgactccggaagcacttacagcccccattccacagagcctgctgggaaacagaggcccgaggggaggcccggcctacaagacccagaagccttagcgccggcaaggcggccagaagtagctctgctctctccgcgaagaccctcgggggattccgcctccaccctttcccggatagagcgctatgcatgcagggacttgtagtctcaggctccccagccggctgggctgggcagcactccgggcggagtcgacgagcgcaggatgtgagctcacagcttgggactgctgaggggcaggcggctgcaggctaggggcggctcggagtccgctggccacccagctgagaggagaggcgcccccggggacggtgagagccgggcccgccgatgccctcggggaagggatggacggcccctgctggagtagagcgagcccggccgggtcctgggggaaaaggcgcgggcggcgtaggggagatggagagctccgatctcccacggagggtgggcgtgagaaccggtgtgggtttctcggtagtgaggagtggtccgggctagagaagagcccacaccggccacatttcccaggactttttgggtgacgcttaacctttacacctagggtttctgctagatccgccactctagccctcagctttcctcccgccgtcctccgtgtctgacggatttctgggtccttcttccttttagacccctcctctttccacctccgcggctgtttgccctttgttgtgcttgggttcccattagcttcgttgcgtgagccacggatccgcccttagccccgggcatccccaaatatccacacacaaagtgcggaaggaagagcactgtggctatcagtggaaacttcattctcactggaattactttctggggcgtcacctgccacagaattcctggaacccattggtctgggcggaatgtgattgacgtcatccaggggctcaaagcaattgctttgtaggaaaggaagagattagctctggatccgccgacctctcttggcaggcctatcctttgagctcctttgcattggcagaacatgtatgtgtgctttctctgatcctgggaaaactaggactagacacaaaatacacagggaacttgctaatacctgttagagaggtggatttattcctttgaggtgggcgggaaaagggaaggtgatctcataccattctagtgtttcttagtcattggcaacctcctggtgagggctcacctcccatacccaacccctgtggcaaatgaaagagtctcccagacaagccgccaaaggaattcactgcttcacacagcacccacgctggctgtccacttccttggacattcttcccagggacttacctaaatcttttcagggacaatttcagtctaacaaactgacgtatgttaaatacttaaaatgtgcatggcattgtgctgagcaccattaggggaacacagcggtaaacttgggaaaccagtgccctgcttctgggttgcacttacaaggcatgagcaactgtaaactcctgcatgtgatgagcattcggtgaaatcattccactttttttctgtctccattattaccaatgtggtccaggctgccatcatctcttcttgcctagactactgcttcctctggtcttcccactttctctcttgcacctttacaattcattctctacccagcagcaagttatcttttcaaaatacactacaagcaagtcagatcatatcactcccctgcttgcaaccctccaattgattcatatactatatagcaattagtatgaaatccacctttgttatcatctaacgcctgccttccctgacttgacatcaaaccaacttccccctactgtctgtgcaccagccattatgaccgtatttctgatcctcaaacttgttttaattttgtcattgttgagatgagatttccctatgtcacccaggctgactttcccaggctcaagcagtcatcccacctcagcctcccgagcagctgggaccacaggcatgagccaccatatctggctaatttttttttatttgtagaaacaaactctcactatgttgcccagactggtcttgaactcctgggctcaagcaatccacccacttcggcctcctaaagtgctaggattacaggtgtgagccaccacacccgccccctaaaacttgtttctaacaggaactttgcacttactcttccatctgtctacaatgctctcttcaaacctcagctgaaatgtcaccatcccaaagatgcttttcctgtccctttgtctaaattagtgcctctccctaatcactctcatatcactgttttattatctttattgcatttatcaggttctggaattatctgcttatttatttaagtccttgttgctagtctgtttccttccactagaatgtaagctccatgtggacatgactttctatatgtgttctcttctgagtacccaatgcctggcacgtaggggtacaataaatgctagctttctctctttttaaaaattcctgttatgatgcttctttgaactgtttgaaggcaaagacaatattttttcattgttccctactgcttaacatagtaggcactcagtagtttaattgctgaatgagttaaatgagctagtacatattaaatgccaagagatggggtcttgctatgttgccaaggctggtcttgactcctgggctcaagagatcctcccacctcggcctactgagtagccaggagtacaggcaggtggcagcacacatctcacctcattgtttttagatttatcctctgatcttttctagtcctttcttctcccattcttattgggagggaagaggagagtagggctgggctccctctcaggaaaaagaaaggaaaacagccatcctatagctgttcttccctgaaaaatggtgacaatttcaggaacttgggacaaggctggtgccaagaaaggggaaggtcaggaagccccagccgaagcccaggtaacctgcaccaagaacactggccggcacccccgaccctggcttactgcattctctcctgaagctgcttttactttccttcctgaagccagactctcggtggtgctcaaaataaacactggcacagactgctctggaggctggaatctttagaaaggaagtgcatcctgtccctctggctcctgggaaactcctagactggctggattcccagtaggtttggttggaagtctgggatcctgggaaccttgacaagaaagtaactggaatctgactggtagatctctagggtgatctgttcctctggccctctctaactggttccatgggtttgcttgtcttcctcgctgccctgagtggagctgagtctcagggaggctgatgaggtgaccagggcaggagtctgggagactgcctccagccctggttcctgctatagtaaaaatggcagggaggccagacgcggtgattcatacttataatcccagcactttgggagactgaggtgggcggatcgcctgcgctcaggaattcgagaccagcctgggcagcatggtaaaaccctgtctctaccaaaaaaaaaaaaaaaaaaaattagctgggtgtggtggtgtgcacctgtggtcccagctactcaggaggctgaggtgggaggatcacttgagcctgggaggcaaaggctgcagtgagccgagatggcaccactgcactccagcctgggtgacagagtgagaccctgtctctaagaaaaaaaaaaaaaaaaaagaaagcaaaatggcagggacttagcctctgccagggagcagtgcttgggcttgtcagggagagaatgagtacggtcgtgtttctgctattgtctcctcctgggctgtctcagctggttcgtgtcttctcttccctctcccatgtacagcactgagattatgaggctctggcctccactggccactcactcgtgaccctttccaccacggcggagccttccaagcctacctcctgccgtgtggtgatctacctgcagcgggagatgtcgggggacacctgcctgtgcccagcctcaggggccaagcccaagctcagtggcttcaagggaggagggttgggcaacaagtatgtccagctcaacgtgggcggctctctgtactacaccactgtgcgggccctgacccgccacgacaccatgctcaaggccatgttcagtgggcgcatggaggtgctgaccgacaaagaaggtgaggcactggggctgccgctcggggtggggagggcaggaggagttcccaaggaaatgaccagatctagaattcagtcacttttcctcttcactttatgtagggtgtcttcacctggagtccctagtagagcttcagaattctgtgaaattgtatatggaatgctgtgtttatgcattttccaggaagaagagccatacttttaaaatatttaaataggacaagattctcataggagccgtcaccttaagactgggcagcgggcagaaggccggcagtggctggtggtttctgtgttgggctgggcctggtaccctgagcctaggcccctgtggcttctacagcctggagggctgtatcccccgtgggatgtgccagttctgggtttcagagaggaagggtgaagagcagccatgggcctgagtgctagaacctccatccccgcctctgtcaccctgcgtaagggctttgtgctcgtggacccccttccctgccacctgccgccagcttgtcaggtggcctttgcctgcctcggaggtacctggcggcaaactaaccctgtagggccttctgcacccctaggctggatcctcatagaccgttgtggaaagcactttggcaccattttgaattacctccgagatgacaccatcaccctccctcagaaccggcaagaaatcaaggaattgatggctgaagcaaagtattacctcatccaggggctggtgaatatgtgccagagtgccctgcaggtacatgggtggggcggagcagggcgggcagatgaggtcaggagttgcccccttcttgtgggatggaggactctggttcctggcaggttgtgtgggaggcgtggttgatgagtgcaaacctaatgagacaagtgagatgccacccaggcccaccaacctggcagccaggtgttcacacttggcagcgtgagtaggccctgcttctggtttctatgctttgctacccggattttagggggtttttctgtttttgcttttgtttctgtttttgtttttgttttttgagacagggtttcactcctgtcacccaggctggagtgcagtggtgcgatgtcagctcactgcaacttctgcctcctgggttcaagtgattctcgtgatttggccttcagagtagctgggaatgccagcatgcgccatggcacccagctaatctttgtattttttgtagagatgaggtttcaccatgttttccaggctagtctcgaactgctgggctcaagtgatctgcctgcctcagcctcccaaagtgctgggattgcaggtgtgagctaccgcacccggcctggatcttgggttttctaactgggggtctgctttccagctggcagtttctattgtcaggggcctcatgatctgtatctgacacttcctcaccaagcagcgggtggccatggcagaggggctccagaggtatacctcgataagcctgggaagcagaagatcctaaagagggttctctgttctgtgtcgcacaggacaagaaggactcctaccagcctgtgtgcaacatccccatcatcacatccctaaaggaggaggagcggctcatcgaatcctccaccaaggtaccaggacctctgaggggtgcgggccggggatgccagtcccctggcctggcccctcactctgaactccttcacagcccgtggtgaagctgctgtacaacagaagcaacaacaagtattcctacaccaggtagggtgcgtcacagggctcaacagacactgggcagcagacccaaggagtactgcctgtactcccagcacggtcggcgtgggtctgggcctgggtcttggaactggctgtgccaagttggggaaaaacagaaagtagaagggaaattgggacagaggcctttggaactcagcagggtgccctggctgggatataaatgattgaaggtgaaatgcgccctcaacgtgtatcacgaaggcagcatggcaggtgttttcacacgtgtcatcctaccgggtggaggggatgctaggaggccggtgagctgggagtcccccaagccagcctgtgcagttcacactgggccgattccctccccacaccctccaggccatgtcctctccataggccacagttaggtagacgcaggtggctgcaggttcagagtcccaaaccctccctatgattccctgtggccaggcatattgccactgtcacccccacagtaagggaaggaatgcctcccactgacatagcagccttgtctccttccttccagggttagtgaggggagacctccttcctcagctgtccctactttgacttaaaaccaactgagttccttttcctcacaggccccccaacccagagggtaccctatgatcctttctctcctggccccctggcatcttgctttcatttcggcaggacaggatgggggaagggagggaggggagggccccacttgtctagcaccctcccttggactggaacctcactcccagccgcttggccctcatgtttttttcagcaactctgacgaccacctgctgaaaaacatcgagctgtttgacaagctctccctgcgcttcaacggccgcgtgctcttcatcaaggatgtcattggtgacgagatctgctgctggtccttttatggccagggccgtaagctggcagaggtgtgctgtacctccatcgtgtatgccacggagaagaagcagaccaaggtgtgggggattgcccctgcctgggtaggggaggacacacacccactgtgcgggggacgtggtcgggctgtgaccagcacggagcaaaaggggcatggacttggctcttttttccaaacacggtaatggtgctgggcaaggacaaggccagaacaaggggtgtggggaatggacgggaactgctttgttcctgacagcgcagggcaggggccgttgaccaccaggaagtagcctagtacagtgggaaggactgggtctttgaagttggcccaattcaggtttgaacgctggctcacaccacttgccagttttctgactttggataagccacttaagccatctgggcctcaggttcctcatttgcagacatggggatgatagtatgaatttaacgagatatgaaaatgatacaactctttggagcagcagtgtggtgtagaaacagcttgggctttcgtgttagaatgctgttcagatctcctgtctgagccagggacacaggtgggcacagcacttgagcccaggagttcaagaccaccctggacaacatggtgaaaccccgtctttacaaaaaatagaaaaattagccaggcatcgtggcacatgcctgtagtcccaagtactcaggaggctgctgtgggaagatcccttgagcccaggagtttgaggccagcctaagcaaaatagcaagattccacttccaaacacttttaataataataaaataaaatctccttactggccccaaccagctgggggtttctggctaatcaacttagtgccaggtacacaggaggcatttgataggtgacagtcatcacaaactcaggtggcccctctcccccaggctgcagtcagttaccccagagagtagctgcctcctgtgagtgcaggtcctggagatgatacgctggggtggatggcaggtcatccaggaagggccatgtgggtgtgaagagctcaaagtagccagacttgccaagcaacttgtcgacccccaaactactccaggtgcctccagctgggagatctgcagagggtttggggaaggccaacttacaggtggccctgcttccttctgcggtttttggtgtaggggtgggagggagggcgacaggtggttcctgaccctatcggtggtgaaagggttcaggggcaggtctccagtggctggtgatgctgcgacggaagtggcagcgcacctggcatcttcttaagtgtgttgtctttcatgaactcgtgtgacccctcacaacatgcctgtgagacacgcagggctagagccactctccccatgtgacagatgagtgaacagaagctcagtccaacagagcaggtctggctagaattcaggtgcttgactgccttccctttctccttcctccaggcaggtcatgccggtgacacactgcgtcaggcaggcagagaaaggcagcataaccactcagcatagcagctgctctgtgtatgcctctgcttggtggtttgctgtgtgccaatcttctgctaagcaatcacatctttcccgtaatgttgacagcaactctcaggggttgagctgaaccaaccttttgtacatatgggagctgcagcccagaagggttcagcccaaggctccacagctagcaagtggtagagctgtgttgggacctagctctggcccaccctctatgcccactagtcccttggtctcaggctggggcaggggtgtggaggatgttggtcttccctgtcctcatgtctgtagagtacatcccctcaccccgccttcggagggaggctggctttccctggagacggaccgccacctgttttatgagaggtagcggaggccttatggagcctcagggccagccgctctgacgcatggcttcctcttgaagatgaaaccttgctccaccttcttcctccctaaccccaggtggaattcccagaggcccgaatctatgaggagacactcaacgtcctactctatgagactccccgcgtccccgacaactccttgttggaggccacaagccgtagccgcagccaggcttcccccagtgaagatgaggagacctttgaactgcgggaccgtgtccgccgcatccacgtcaagcgctacagcacttacgatgaccggcagctcggccaccagtctacccatcgcgactgaccagaccctcagggagtcagggcacgggaggccctatctcccatcctgtggaacccgccccattggccaccccatgctgctgctgcctgggtctctgctctagcacccagaggcatgacaggccctgctcagaggtcagagggtctgggcagaggagggaccacattcccctgccttgcccctgagcacttctggagactgcgtcctgtcctatctgctcaccatcacccttcctgcccgacggagctgcttctgctccctggggcatatggactgacccacctcctgctgagaaccttcccctaggccctgtgcagaaggctactgccccttaggcctcagctgggggaaaggcagttctggtgctgtagaggccctggtgcagaaagtgggacgtcttttttcctaaggtgtttaagcacaggcttgataagtttggtttttaaaaaataatctaggaaatgaataattctaaatctagtaatgaggaaactgagcatttcttttgccctccagggtgccaagaccctacatatgacagaacccttggcccttctccatgcctgtgggatctgtttctttaaagcactttgtactgttattcaggaggttgataatctccttgacccatgtctttctaccctaatccccacttccctgcagaatcaatctgagggaggggataaagaggaagcaataaaaaaaaaacatccgacagagcagctctggctttgcagcctggccagcagctcagagtgcaccgaggagggaaggatggctaagctgggaccggcagtcctcacagggtgcctgtgagaaaggacattttacccccacatcatagtcacatcactgactcctaggtctagcacgactgctctttgtgattctcttgagtacccttggcttccagccatgctgtcctcacatacggtaaagccaaagagctgtcacatgggccagaaacatgagccacggcaggaagaccgtggagcccgtgggcactgcatggtgttggctggcatgcccatcagctgaggacagcaaactcccagcagcccctacagaggtggcacatgcttggccacacatctactccctgcccacaccatctatgctcttggttggtgctggctgggatggcggttctgcccagtggtgtctctgagcgcgggatgacaggagcaaccgaagcaccctgaaggccttcactccttgttgggtaactcagccatggagatgccaagcactagccaggaggtgagttcctctttagggctttggttttcattcctttttgtttggcttggccaaaccagaattcagcttatctgaattattttccaaaggaatgctgtcagggagggactgttctgccagcctaacaaagcaacgtagccacgtatagtacccactttctgctctttggagagaacacaggttatcaagttcatctctcttgactactcttatgatagctgatgccacagagcctatgggcaaatgccagacccagggttagacacaaggacctgaagtgacatgacggcgggacaggggaaatgtgactttctaattaggcattttatgttagtcacagtcttgaatgtataaacagcactaagactctcaggtcaggtaccttggtgatcagctactagttcttccagccctcattgaggtaacaagataaagacaaatccacttctttggccaaattcaggctttggctttatgactttcccacagagactggaatgcgtcagcctgagaccactggcctattttctcagctgccctcttgaggtcctttaacactcaaattcccagctccccactgaggtgttgtgatgcttgccttttgacctccccatcccctttagtccctgcttactactttgacattcacatcctcagtgtctcagtcttttttgccgagaaagcacagtagtctgggactgggcatttatcttctctgactgaaaatctctccttggtcttaaggaaaatactaacattgaactcactgacatgatcttagcttctttaatcagactttgtgacttaaaagtttgggggttttctttgaaagtttccagccctattcagaaagcaactcttggctgtgtgcatttttcaactccaagcagcccaggggtaagtaaacaaagtatggatgaaggtcagattttcttgtcagtttctgagaaacctggcagcctgctgttaacaacacaggccagtattgggttttattgaatttggtatgtgaccaaggtcggcctaaaggatggcgcaggtcctgggcaggaaagaatttttcctttatcacataactgtaatatttggttgctcagcataagtgatggaagcaaacactaatttctaataaaattgtgttaaactcaatggtacagagccatgtttacagtgagcaggccttgaccagcttgcggccatgggctgagttcctgtgcttctgtttatcatctgaccttgtgttctagccaggtcgtaagcgcgactgtactgttgccctgcaaccccagctccccctggaggactaaggacaagaataacaagggctggaactgtgatttaatattaattcaagaaaactacctctaacaatcactgcagtggcggaggaaaagaaatcctaagaattggggcaagatgcagcacaattcatctctggctcttggaaatctgagagaagctcaggaagtagcttgacttagtcatcaatccatacctaaagctgctcctcagccaaattcctgcatttgtggtctggatgcttggcagagtcatgctgagggctggcacacccattgctccaggaaacccgactggcttgcctccctcctctcctgggcctagcgaggccagaaatggcaatggtcggtcagtgctaagagccaggccactccgaccctgacactggcctccctctctgcatttggcagaaggtaaagtgaacaagagtccagtccagcacccccgccaactagctgagaggcacagtgaccctaggagatgtccagccagcctccaggctgagagggaaacaggcacatgccctaccaggggggcagctccctggaagggcagcaaagaaagcagtcaagggcgcacactgggtcagaaggggagcctgagactctgggagcagaaatggcaagggtggccaagcgtgcactggtttactgatcaaacctcacgtgacaggccaggaaactcctccaggcctgtggcagctgaacacagttccttggtggagaggtttactggaacatggtgtaggcagggcttatgaggaggccagccttggaggtgtcccacatgggtcttctgaagaaaagttataccacccctccccacaaaaagaaccccacaatcaaattaagagacccactgtggcccatgatggggagagaagagttctgcagcaattgtgggatgagagttgttcttcccggtgaccaagcctgggcacttggggcctcagctggcctaccagtgaaggcctgagggtggtgtcttctcatctttattgctttccagggagaagggaggaatccgaacatcaaagtgggagccatcaggtctttcaaagcggaacgtgcccctacagtcagaaagaagctggtttagaaggagccagggctgaggcctcctaaggatctggatggccccatgccctcagctgccagccacagaggacatgtgagcctgagctctcttctatctctagctcatgacaggatgactggtccagagacccaagagcccctcatggttatccatgaaaagaaaaacacagctgcagtggctcacgcctgaaatcccagcattttgggaggctgatgccagcagatcacctgaggtcacctgaggtggggagtttgagaccagcctgaccaacatggagaaaccccgtctccactaaaaatacaaaattagccgggcgtggtggcgcatgcctgtaatcccagctactcgggaggctgaggcaagagaatggcttgaacctgggaggcggaggttgcagtgagccaagattgtgccattgcactccagcctgggcaataagtgaaactccatctcacaaaagaaaaaaggaaaacacagctgtccagattctggcctttagatacatactgcataagctagccaactgcattttcaggtaaaggagtgaaacaccaagggaaaaaacccaactatacaagcaattctgcagcatcaaatcaccagacctctttagcctaagtcctcagtccacaaatcacagggtactgggaaacaggcggtaatagaaaatcagacaagtcccacacaacaatatagcagataaggctccctctaagaatgtaacttggcccagagttaatggcaagctctaagctctcacttttctgacctacagcttctgtttgtggagctgggtggcccctactgctgtgcacactcactcaccacatgtgcccactggaagcctgcagcgagacgtggctgctatactggaacgcaggctgctccttggataacactggttcctgtaaaggtttaggcaaaatgggtcaggccaagccccagggacatgtttcctgcaccccagggttacatgctgactgccagttcatcaagactggatgtcccctacccagccaccaccacagcaggcactcccatagcatgatacacttcctgccagtacctcctcccatagatggccatttggctgggccttttatgctggctctgggaaagataatctcagactgaatgtccgaaggcactgggcaaaggacctcctctgcagcccggggaacacagtgagaccccatctccacaaaaaaaaaaaaaaaaaaaaaaaaaatttaaactaaccaggcatagtggtgtgtgcctgtagtcctgctactcagaaagctgaggcggaggattgcttgagcccagaaaagtaaactatggtcgcaccactgcactccagcctgggtgacacagcgagaccctgtctctaaaaacaaaggacctcctgtggagatatcccctccagtgtccattcacacatgctggcggggaccacggcaggtactctgcaaacctctgctgctttaattctcctaatgatcataagataactggtgtgatccacattttaggagtaaggaactaagattttggttaaataacttgccgaaagttatgctaatatataactcagctggaatttgaagtgactacctaaatccaaagccttgttcttattcacttgcccaactgcctccccagtcctcgctgactttgataaatgcttgttgaatgtggcccctgacaccagtactgcttgtgactttatttctcaggagacagggttgggtaggcagggattataaaatcagatctcttcaaggaccagcagaggatgtaaacatgtaaaggggcaaagaggcaagaccacagggattggtgggggtgtgtgccccacctaacgacattcaaattttagtttttaaaagacactataccagttttaaaaactacacaagttttgacttcagactcacttgggtttaaattgaggccctgccactactagctatgggaccatgggctggttatttaacttctcagtctcactcttttcatctatgaaatgggtttcaagaaacatatctcatgtagttgttttaagatttctaacccaaaacaacacaatgtattcacaaagtgagcctctgtctataacaacaaaggagaaggaagccatgcgctaagcccccaggcttgccacacaggaccagaattactagaccaaggatgctcaccctgcccactacccctcggcctcgcactgtctccaaggtgccagagagactgaatatcctccagtgccgctcccggagctgtaccacatcactgtcaaggttctccaaacggatacagtagcgccactgaggtgggtgtgggagagagagtttaaaaaaaataaaatttgggtaaccctcctcagaattctgtgcaaagcaaaagtcaacaaagctgacacatgcactgcacaggttccgctctcgtcagaaggtgggctcccccacctccaccctgacccccaggcacaccccacaagctccccttctcccagacagtgacactcacccagtacacgtgggaattctgggcttcctagggagaaaacaaaaagaatttaagtcccacagggcaagaccaagtgtgttccaatcaacatctctccagtgcagttgatgtattccaggaaggttgcagacagaccaagctgagagtatctgtgggataagggtgatagctgaaccatggcctacacacccacagggaggcaacatccctgtatccactcctggcctccccactcctcatcccttcaagatcaccaacagagctggatgccaacagaaatcagttacagggctcttacctttttcactgccctcctcaccagccctgccccctatccttgctgccctgagcccctgtcctcctcctgtctcccattactgtcccttgctataatactttaagttggcctcctccactactataaggtcctggaagacagggacggtgtttcatttatatttgtatccaagcatgcactgactatacgtacttttctgacctatagcttctgtctgtggagttgggcggcccctaccactgcacatgcttacagccaggcgatgtgtaagtgtctataatgtgtaaaaagtgttatgcctacactgctttaaataattatgtgtatattcttcataaacatggctccctttgagcaagagggaagagacaggataaaggattccttcctgggacctatgagttttcctgcccgctctaggtcttggtgtcagccactgtctagaggctactcaaccccacccaacacatgccaccacttggaagcagaaccacagggacatggtttatatttagactcccttcccccggcagtcaccttaaggacaccatacaccttggggcctacccctgctagaaggggtccaggctggccacataccctcatgcccatgtagaaggggatgacagtgacacgtatgttctcagttgtttcccgatgaacatcggagagctccagccaggggtgattcttctcttgccaggcccttagcgtctcccgagccacaaaaggaggtgctggggcaagatacaattggttagtccaattgtgtgttgtggatacaattgtatctagtccaatcacacaatagtccagtgcgattgcccctcctagaaaaccctccctagtggtggcccaggcaaacaaggtgctcatacatgaagcaaaagttcaggctggaagaaggcacaggactgctaccaagaataagccctgaggagctagtgtgatacaatgggaaaacaatcggactggcagttaagagccctggttttcagccctcactctgctactagcaaccttgagtcccttgtcatcatccctgatcctcagtttccatatctgtaaggaaataactgccatctgtcatctgtcaggtatgacacctatgaggcatgacagctctaacaggaggttgaaaagggttgtggaaatagagcgttggaattatttcttttttttttttttttttggagacggagtcttgatctgttgccgggatggagtgcggtggcatgatctcagctcactacaacctgtgcctcccgggttcaagcaattcttcagcctcagcctcccaagtagctgagactacaggtgcacgccaccacacccagctaatttttatatttttagtagaaacagggtttcaccacattggccacgatggtcttgatctcttgacctagtgatctgcccgtgtcagcctcccaaagtgctggagttataggcgtgagccacaagcacccgggcctttttttttttttttcctgagatggagtctcgctctgttgcccaggctggaatgcaatggtgcaatctcggctcactgcaacctccaccctcctgggttcaagtgattctcctgcctcagcctcccaggtagctgggattacaggcgcccaccaccacgcccagctaatttttgtatttttagtagagacagggtttcaccaggttggccaggccagtcttgaactcctgacctcagatgatccacctgcctgggcctcccaaagtgctgggattacaggcgtgagccaccgtgcccggccctggaattatttctatgatattctttgatgaaaaggccctcccattccacctccccttcttgagagagattaccttttgtctggtcatacagaagaaatctttcaaagagttcatgttggatgggaacctgatcagtggaggtgtaggggaggatgtcttcatggctgacatagtccaagcctggcacagagatgcaaaagacagtggtgaaactcacaggagaggagagagatggggttgagaagaaacattaactggccttgttccagtatgggataaccctgatatcatacctctcagcatcataatccctcccagtggatgacaggacatcagaatcctctccctgagacacaccagactccttcttgacgggcaccattcaaatgctaactactcacctgggatggcatagagggcccgactgtcatcatggttagccaagaaggtcacagcttctgtctgagatctctgagactaaggcaagaagtgaatcagtggtgaaaccatgtctctgctaaaaagtacaaaaattaggctggtgtggtggcagatgcctgtaatcccagctactcgggtggctgaggcaggagaatcacttgaacccgggaggcagaggttgcagtgagctgagatctcaccactgcactccagcctggcgacagagtgagactccatatcaaaaaaaaaaaaaaagacgtgaatcagggctttgttggccactgtgcagtccaaggccttggggaccaagactgacctgggctctgtttgacccccttccctccctttgtccccattgggatgcaggactttccatggagaggacccccaagcccagccatcttgcttacttactatatgtgggcagtcacgagcatcaatcagcacctgatagtaagtgtgagttttgcctttcacctccttggagccatggccagcagggttctctgctctatggggtgggagaaggaggccaagatcaccccaggagaaatggaagctgtggctgactcagctccctactcctcctcacctaaacaggctggtctctgatctaaaggggctttagcaccagctggacacctgctctgcagcacctcagctcagctgctcctcagttggggcaaataatagagcatggaagaccatggtatggagccatcatctgaccgtgtggatacctcttaaaagaagggggccatgttgagaaaatcaaattgccacctcagtccccagggcccagagtactcttgtcttcttatatcccagggactgtctgtgatcacttaatggggctgaaccttttctgttttaatgtattctagggatgatgtgagattgagggaaagactccagctgaacatcaagaaatcaagaagacttgtcccccaaatgccctctgggatactcataatgaaaattaggaatggcttaggaaagcattctgaggaggcctaaagggactctctgacttagactatccctggcactcagcacttttgtctccatgggtcttagtcccagagaagtactctggggatgtttccaaggcctaggaggacgctgtcttcacccctagtaccccaattacatatgtctgccatctcctcctgaggatactgtgaggcacaaccacagggaaacttacttttctggagctgcagaagccacatcccggtcatacagtctggcctgccagggaaacaggacgacacctcggtagccaaaaatgctatgaaggaaaagctggaaggaaagaggggcctcagtgagtctgcagtccagcaaatccatccaggtgggccccagaccacaaagcaacacaggtggaggcaactccagcacaaggtcttgctacctcttcccttgaagtctgtgatcaaccagaccaatgctggaacactcttatttcttctttacctggctgactctactcatcctttaggtaaaagcttaggcctccaggaagccttccctgacctcccttccacttagcacaatgtacagctattggccatttgcaaatcgttcttttctagactagaaactccacaatagcaggaatcatgtctactttgctttctgatttaaccctaatgcacaatgcctagtccattgtaggcacacagaaaaataaaatgttgaacaaacaaaaagtcttccttacctacaatatcctagaagggcctaaatctatcccagtggacccagaacaaagctgatatagaaaaagaaccacacatccagagtttaccacactgaagtcaattttattacggcaaagcatcaaaggtatacttttctgaaagctccctccacggcttcccaccatccactatgttagagaaatcttcagcaacttggctaaacctcactatagtccacaccatccctgtccacattaacttggaaagagaacccactgacacattaagtgcattcaaatccaggagaacagaaaccctatctataaaaatttgattctgggctgggtgcggtggctcacgccagtaatcccaggactttgggaggccaaggcaggtggatcacctgaggtcgggagctcgagaccagcctgaccaacatggagaaaccgcatctccactaaaagtacaaaattagccaagtgtggtggcgcatgcttgtaatcccagctactagggaggctgaggtaggagaactgcttaaacccaggaggtggagcttgcagtgagccgagaccatgccattgcactccagcctgggcaacaagactgaaactccgtctcacaaaaaataaataaataaaataaataaataaaataaaaaatgaatacaaatttgattctggaatggcaccaaacatcaaggtggaatgaatggaacaccataccatgcaggcctgtgacctaatctgacttttttcagaagcagagcactctatgaaaatgaaagatgacccagcccaatactcacctgcccggtctcatattttccattctgttttggcacctcaaacacaccaactgtctccaacactttgccctctggtcggtttctgagtaggaaggaaaagaacaagcaacagaaaagctgagaaggtaatggtagttatccataagaaaaagctcctaggatactgaggggccagggcgatgacagcagagaagggtttggggtagtgggaccagctggagcaggaaaggctttcctcctccttggtgaaaacctccacagtctcccagtgttagatgtgaccgctcccatactactgtcttctctcttcactgggcattcttcatatcatgccctcacactctgctcaaatgtacccctgcccttgtttcttccctaacccaccctcctgacctcccacagcactttaactgtcttgctcactttttcaatttttttagaaggggagtatctttttttcttcttttcttacattttctatatcacaagtcatcaaacaatatcctgctccctttacatttcagttgtgtccatgtcttatctttattaaatactgtaaattccctgggagcaatgcctgagtctgattagctggtactgccccctcagagcctagtgtacaagaggtgctcaaaaaatatttgtcctgtattataattccatgtccatctccccctctaacctgtagcccttacattgcccttgaaaagcttaaacatctctagatttcctacggcacatcgctctctcaataccgtttttgttcatattctcacaggggtcttaaattgcaaatagctatcatctctccccaatgttcagtgtctaatatcagccactaaaatgtcagtcaccactctgaacagggctgctctttctaggggcccttcaaataaaggctgtttttactgttttgaagatgtgaactttatgcttcctcccactgatccaccagcccatttgatccgcctgtcccatccgtggaaacagtttccacaccatccccatggcctcaaacccccttccccaagtcacagatagaaaatcgatctccccaaagtcacttggaaacctggggcctacgagggtccacacccaagagtctcgtttcccacctctagcatctttctgaggcagaccttcaccaaatccaaaggctgagggttcaagccaatgccctagggctgaattaaaaagcttccctctgacatcggtgctggggaccccagccggggaagtaggattcacttggggagggtaacctgttcccccccagggccagccctgtacaaccagggctctgggccgcgctggcttccctgctcctggcacatgtcccagacagcgcaggtcggctccctgctcgggaccctctcccgggtcaaactccagtcaccctcagcaggcccgggcccctggcctccgcactggctaggaacacgctctctgggctccaggcccagttcctcgcgccccctggctccgtccctcaccgggacgagaggtgcctccgcgtcgtcgtggtcgacgctggcgagaaggctccagctccggccgccgcacagagcggccttggccaccgggccccagtcagcgaccgggaccaccagcggctgcccacggccagggcccgccgggctgtacaggctgccatgtcccgcccgagcgcccgcccggctgctgacacagagcccgacccgcggccgggcggcgttccgccccagtcccacactgccccgcgcggcgtcccggccctcttggcccgcctggtcccaccccggagctcagagcaacttccggtgcgcttagcgttacttccggcgcgcggcgggcggaagtccgggttggggtcacctgaccggagagccggctagatatggcgtcctctttgcttgcgggcgagcgattggtgcgtgctttgggccccggcggggagctggagccagagcggctaccccgaaagctgcgggccgagcttgaggccgcgctggggaagaagcacaagggcggtgatagctccagtggcccccaacgcttggtttctttccgtctcatccgggatctgcaccagcatctgagagaaaggggtgagccccagtctccagtccggggtcccctccttgtgtccagatcgattccctcctgaggtcttttcccatcattccccttcttctacggagcactcatctagacaagtcaagagtcactccataaatcccagggccacccactttcttaactcccatgggaatttctcgtggatgacaaatttgcttgtgcagtttctgctcttttgagagccccctcttcacttccaggcacacctaggcccaattcacccttgagaaagtctaggtttttaccaaatacaaatatcacaggttttgtctcttctttttctccactttaggaatcagcttagcatagtgagcttgtaggaatccggatttctttccacctcaaaagcaagagtggtgaaatctgatactttgttttgtttgtttgtttttttaatataggatggcaaaagctgtgttgaaagatctggcctgagagtagcatgtgagttccagtcctagctctgtcactaatcctttgaaggagtcatttctcctcgctgggcctcagttcccttatgtgtaaagggaaggaacaggacaaactagcacataaggtattttgccagaagtaacatagaccagccagaagtgcaaagggtagactgctcaattattagaactagaaaggaccttagaaagagattgcctagtattagtgtcctctgagcatttagcatcactatgacctaaacttatttagggaagagctgttgtggccacagaactgatctaacccaaaggcacaagtaaatggcttacttgttagttataacactggcaggataattgagagctgacagctaaagtcacctgcgcagcactgggagatacctacatggaattatccaaaattcttttcaattgaaaatgatcctggaaatggattaatgtagagatggccctgttttattttggtagaaagaagggctacacccctcttgatcttaacccttcaacctcagctcgtggatcattgtgtttgtgaaaccttttcttctcagattccaaactatacctccatgagctcctagaaggcagtgaaatctatctcccagaggttgtgaagcctccacgggtatgtaagggatatgtttgtgagagtggttattgactgagttgggcttatccatgatacactgaacttataaatcaacttttaggcttgaaaaattgtttttgaaatctttgggatctgggggagccagatattgtcctccccatcagctgtttggaaaattgagatcaaaaaaaaaaaaaacagtttcaaagcactggagttacgactagtatgtgggtctcctgatacctttagcagtgctttacccctggaaccaatgattgtgatgtgctttctaacaagctgggaatatcattcttctcatttgatttttctgcttcagaacccagaactagttgcccggctggagaagattaagatacagctggccaatgaggaatataaacggatcacccgcaacgtcacttgtcaggtaaggacatgctcttcagtacgtggtctaggtagcccctcagagtagggccctgcagtggaagaagatacagagtttagaaaaaacatggaaacttggtttctatactgttcagggaccataggaagtctgcatacaaacaacacagttcccatctcattcactgagactctgggctgagatggtgaccaagttttaaacgtcatagaagtgggagttagccgggcacggcgctcatgcctgtaatcctagcactttgggaggctgaggtaggtggatcacttgaggtcgggagttcgtgaccagcctggccaacatggtgaaaccccgtctttacaaaaaatacaaaacttagcctggcgtggtggcgggcacctgtaatcccagctactcgagaggctgaggcaggagaatcacttgaacccaggaggcggaggcagaggctgctgtgagccaacactgcaccattgcactccagcctgagcaacaagagcaagactccatctcaaaataaataaataaataaataaataagtgggaatgaatcttggaggctttttttcttcttcttttttttttttgagatggagtctcactctgtcacccaggctggagggcagtggcaggatctctgctcactgcggcctccgccttccaggtttaagtgattcttatgcctcagcctcccaagtagctgggattacaggcatgcaccaccacgccaggctaattttttgtatttttagtagagaccacgttggccaggctggtcttgaactcccagcctcaaggtgatcctcctgcctcggcctcccaaagtgctgggattacaaggtgagccactgtgcccagccattcgagcatttcttctgacagggctccctactactctatggcatgctcctaccctggaacaggagagtagatgggtactggcagcctatgtcctctctccgaaatgcctgctctgtagtccagaaaagagtcaaaatggttccagacaaaagaatccatggggagggcagagttaatatgttggggaatagagagggctgagccagactgtcaatggatgctctctgagctgcttctattctgaatcatcttctttttctttttcccaggatacaagacatggtgggactctcagcgacctgggaaagcaaggtgaggtactaggagatcaggcttctaaaaccttttcctgagatgggtcatgacactcaggcttgttgtttgactgaaacccagttggtgggggagccatgagataagagcacctcctagagaatgttgaactaaaggtgccctctctggctcctccccaaagtgagatcattgaaggctctggtcatcaccatcttcaatttcattgtcacggtggttgctgccttcgtctgcacttaccttggaagccaatatatcttcacagaaatggcctcggtgagtaggcactgggcagggcagggtgcccctggtgggggtgttagtgggtaagggaggacgtatgtgaaagtgccttgcacaggttaggtattgaacagatatttatgccattaataaggggagcattagagctttccagcagtcacgggaggttaggtaataaccccaggagaagccacattctcttttcttcccctcccccaacttagagggtggttggggggctctccatcctcattaaagttgctggggtacagagctggttgttggcctgcatcccttaagcctggttctccccatctccagcgggtgctagctgcattgatcgtcgcctctgtggtgggtctggccgagctgtatgtcatggtgcgggcaatggaaggcgagctgggagaactgtaactggtgcttcatcatcaagtctagagaagactttgggggcttcaggctccaattggcagtcaccgactcagtcaacccatcagactttttgtattcagctccagttagtcagaagaccagcccaggccagctgctgtttctgtggggagccctaatcttctgtgaatttccaaagggagcattggaggagattgagataacacatctttaaaacagaaagaactggtcttggtctatcagtacctcttcctgaatctggtacccatctgccttctccagttcattctaaacactgctgggactagggtttttccatcaggagcaaatggaatccaggccttcccagaagtagaccatactgccttgaacttgtccatatgtacaaactgatcaccagctttctccatacatttttaatgcagacctgtaattgagttcagaagcctccaagaaaacagaaaggatcccctttctccagtttgtgctggaagaggagctgatcagagacatcaaataagagaaagatgggttgctagaggatggtagaactggaagcaaggcagctacctttttgcaaaaggaaatggtgttaggccccttttccagaagataagacagactcatagagattaaatgatcactatggtccttcttctgttaaatggagccaaagacgcctatgttgttctgaagtcttgtaatgtttaacttctgagaacttagattagtggtgtgatgatagagtctgtataacgcattgaaaagggtatcaggcttagttatttatccaataaatatttattgtatgcagggtattcctattttaactcctgtgacaacacaaagcatagcgatttccatagttctaactgttcagggtctgctcctcctggtacactctttttggttcactgtatgtactcctgttgtctttttttttttttccaaagcacttttctgttttcataaattatatactcattcactcagtggacacttcctctacaatgtttgccagtttctgttagttgggagaagtgtcagctgtgaaaagaaaaagtaggtggcattttacagtgtttccagtaacctgagctatataaaatttgtgttaaaaagctacactgggccaggtgaggtggctcacacctgtaatcgtagcattttgggaggctgaggcaggcggatcacttgaggttgggagtttaagaccagcatggccaatatagcgaaaccccatctttactaaaaatacaaaaaaattagccaggcgtggtggtacatgcctgtaatcccagcactttgggagaccaaggtgggaggatgcttgagttcaggagtttgagaccagcctgggcaacatggcaaaagcccatctctacaaaaaaacgcagaaattagctgacatggtagcgcacgcctgtagtcccagctactcaggaggctaaggtgggaggatcacttgagcctgggaggcagaggttgcagtaagctgagtaagccaagatcatgctattgcactctagcctggatgacagagtgagaccttgtctcaatgaaaaagcagggggcactgggaggggagaaccaaatgccctatcctccagttctcagcatatagaagggagctctctcatctgctagccactcctgcctcactgtgccatgctttctgtaatgcactctgggtccagggactgcttggcaggaggtgggaagaacaagaagtttagggccttcccagtttcttagggcctgtctggagagggaactagcgtttactgagtttttacgatgtgttacacaccatgtaaagccctttacctacattatttcttataccccaaacagagagcaaataagtatccccattttttagtcacatagagttccagagttgccacagttacatcgcaaagtcaggatttgaatccagtgcagaccgcaaacaccatggttttctctccaaagcagagcagctccagaggtggaggtgactggaatgtcctagattcagtgggaccaggagctgggggtgctagcagaggctctcatctccccagggtcttgtcagtcagagtcctaaacccttcaattaactatccctctaatcccagctgaagcctgggtaatacctcccaccaagaggtatctgtgtggaacctggccctatttagggattaggtgatggagataaatttccatggcaaacggccctcgtccccgttcgtttgcagagcacaacaatccagattaaggtacagagtttgggttttatttggagattagttggtattacaggtgatggtgataccaaaacccaatgctgctatacctgcctccatcccagatctgtcaggttgtctccacagccccacatcagagggcatccaatctgatctttgtgaaaattaaatcaacataagccccagcttcctatctttgcttcattactttaatgccactccctcttcacatccgtagttctgattaatttgtccaggtggtcgatggtcaagagagggggccctgacccataaagaagttggctctccagcagtctagatgaggagcagcactctcctctcctacctcacttagcagttagcaaggtaatggcctggagagacctcaggagacaggagcctgccccttcagaaggaggaggccatcagctggtgagaactggggaccaggcctggcaagagtggaggaaaacatgaccctcatctcatccttctgaaggtaccacctgccacaacaatgagcatatgccccaaaggggtcagggtgtggggtggcaggagccaggccccagtctgcttaggacctgcatctaggctggcctggaggccagtggaagggagggatgcctgagctaaactcctttcccgtagggaatccctttgcataaaaagtggggccagggaatccacttctgatgtgttcaatcccaggaggggcagggtgggccacaggagtcagaggaggggccttgcaagttctggacaaagactaggagtggtccacattgacgacaatggccaaggcatagatgaggtcagacaggctgcctagtgaagtctggggagtagctcgctctaaagaagggtggacctctgaagccccagctgatccccatggggctacagctttagccccttcccagccctgccgtggactcaagccaggagctggacaggagctatgtcgacacactgaggtgcgctgaggtgtgccgctggagggtggaggttggcctggcatttggggatcccagggctgctggagggtgtctggaagagaacaggagctctgggggcactcagacccagggcttagaattcctgacttcctgttcttgattattttggcccagcgcttctggaaccacacctgctaggaaagaagaaggggtctgttctggccccagcatcccctccacccagggacaggggaaacaacctgaaggcaggctacccagcgaaggggctgtgggccaagcctagatgttggctgtgtgagaaggggtcacagctcacctgtaccttggcctcaggaaggcaagtgacccaggccaggtgctcatgggtgctgatgttggggtagggccatgctgcaaacgccctctccagctccagtagctgccctttgctgaaggtggtccgctttctccggtgggaacccaacccgctgccaccgtctgcaggccatggtgggggtcaagctgggactccctgcaagagcctccacccagcctcaaagccctcaatcaaccccgaagtccctactcccacccctctccaaccgtcctcatcctaccatggcctgcgttctcaccctgcccacacttcccccatcagatcacctgctgaggatgcatccacagggctgggcatggagctggcaaagggtaaggtgccagagggccgtgccagagggccatgccagggctgtgcccacaccagacccccccatttgggttttatcatgctcagggtggctggccccgccttcaggagtggagaggtttagagtccagctcaagcaaggcagagaagtctcggtggggaagaagggaggctggaggccgggttgggcttatgagggtatgggtggggcaaattgtataccccctgcccctccaaggcctcgcaaaggaagctggacccagcatcccttctcaaacctcaaactggcagtctgtgcctgaaatcctatacttcatgaaaatcctcccaggggtccttccaggcagccaaagaaaaccatctctccagtgctcccaggcactggctgccccttctggagcccttagtgctctgaacctggctaccttcaggggagagggagtggagtcctctcccacaactggggactgggctggtgaagtgggacaggatgagaaggatggtagggtgtcaacgggatgaatgggagccagccgctgtcagcaggactggggaacagatgtcaccaccagattgccctcaggtctgctttagagctttgcctcatctaaccctttctctctctggcccctcaagagccagatggacttcctggggttcggaacctggaaccagaggaggttccacaggtgcagttgaggggttctaagaaagatgataaagatgtttatgtgtacagtattctcttccttggatatattctgagccactttttcttaaattttgaaaatttttttcttttttctttttttttcaagatggagtcttgctttgtcacccaggctggagtgcagtggcgtgatcttggctcactgcaacctccacctcccgagttcaagcaactccacctcctgcctcttcctccggagtagctggggttacaggcgcctgccaccacacccggctaattttttgtatttttagtagagacggggtttcaccatgttggccaggctggtctcgaactcctaacctcatgatccacgggccttggtttcccaaagtgctgggaccacaggcatgaaccaccgtgcctggcctaaattttctttttctcactctgttgcccaggctggagtacagtggtgtgatttctgctcactgcagcctcaacctcccaagctcaagcaatcctcccacctcagcctcctaaatagctgggactacaggcacacaccacccataagttgcccagctaacttatttatttttgtagagatggtgtcttgctatattgcctaggctggtctcaaacttcgggattccagcaatcctcccaccttggcttcccaaagtgctggaattacaggcatgagccaccatgcccagacaaaaattcccccccttttttattttgttctgtttttagagatagagtctcactctattccccaggttggagtgcagtggtacaataatagctcactgcagcttcaaactcctgggctcctgggccacttttccacaagaagtgtgtgcttttgaatttcctttcagtttctgcccttcactatctctcctggtcttgctgctccccatcctagaccctagacagagacctcaagaaaggctcaccctaggggtgggtttggggaagcacagtgactggttccccaagtgctcaggagtcagagctactaggatttcagatcaggatggacaaaaaagctgagccagaaccccaccaactcttgccccttctctctcctccaagaccctagtcaactccaaggggcaaagcaagcctcacccacggaggctggcctggtaactttgtcatcatcagaggagttcaagtgtctgcttagctgctggtgggttgctgggggctgcttagctcaagaggaagggtagctctcaggaggccttccccagccccaaaccggttcacagagaggtcctgagcacagagaggtcctgagcccaacatgggttggacacggcgaggcccttctctgtcccttctctgtccccctcaccaacccattctgacagtccagcttcctctcctttacccagacagggatgtgtctaccccagtcagaacaataattttaaactcggggctaagggacctttattgggctgggggaaggagatgggaggagggagctacagagggcccggccatgtgggctctgactcctacagatggccaggagctgggcagcccagccagtactgagcgatggagcgtgggtagggagggtccacagtgtccactcgccgtgtgcgaagattgactcggtagtacttgtctggaagagaggaaagcagaggatgcgtgaggcccagcctggccctgcccactcttcccttgagaagtctagggtctctcccagaagggaaagtgaacatccatgatgcagctaaggacttctggcctggctttctgtggtcactacttgcaggctgcgttcagcccttgtgcaccagggacagcaaggaaaacccaagctagaccagcttcaggggtggcagcggctcctacctccagagaagaagaagacactctggatgggttcacaggtggcaggcacaagccagtccatcctgtagtcatcatagttgttggctcccaagttgctctcctcactggagaacaaggacagccacgtggcgcgggatggccggcgggagttctggttgcggccacggctgtggcctcgttgtgaacggtagcctttgcggttgcgatgcctaaacctttgtttcttggccaaggaggggcggggtgccatgcctgagatgtagatgcggccagccatggctgcgtccacttgccctggcacaccgtgccagtcccggctaatgaactggggctgtctggtaccagctgtggcagggaaggggtgaatgagaggtcttgggggtccgaatcttgccccttccagcggggccattagagttcatctgctgcaccttgcccaaagacacacagcagcgaatggcagagccaggcctttgactctcagtccaattcccttccccctgtgctttccctccaccatatcactggtgtctcgaccccacccccccaggccccctaaactcctcagccacagcccctccctctgctggctgtgctctcagctgtgctaggcaaagtccaaggtgtggggtccaggtagagctgagctttccccaaaaggtcaacagaagcaaagtctggcctgagcaaacagactttgatcgatagctccacaaccacagccccctccagccggcctggctctaccaataccaaggggtttcagcccttttgagggagaagcaagacttgccctctctccataccagaggttctgccccagaagagaagctcgaagatgtcctcccagctgtcccgctgcatcatggcaaagtgttcaaacacagccgacagggagctgccttcacactcctcctgactgggctggtgctggaactggtactcccagtactgtttccctgaggagcagggtggtgggcattaggagggctgggccagggcaagactggagatcccagaggctgttgaagttaggatctcccagcatgaggtgggggtcaggggtgggcacatgctgaggcctgtccccagtgaaatgtgaaaggaatccaagactgctccactgcctgctcagtctcccaccaccccctgagtacccttgaagaagtagacccgctcccggccactgtagctatgggcagggagggccaaggctgcatccacgttgtccgggatgccatcgaagccgtcagagatatttcgggggtaatcagggtccaggacaccatcctcaaagcgccagtactgactaccctaagaggtggggaaagtgaaaaggggtatggaggccgctggctgggcacagaggcagagtcccttgccctaaggcagccgttcccaggtccaggttcactgcccaggacctggagtcttggggctgccctgtgctcacagagctcccaccaggtcctgcagggccctgggtccagcttccctgtccaccctgtccctgggagcaatagctctcaaaccctccctagatgctttctaccctggcccacagcccctggcaccttgaagaggtaggtcttcccctgacagttgatgcgggtgaaggcggcatcgatggggccctcgatgccccagacatctcggatgagcttggggtacccaggcctcactgccttttcgtccagttcatagcagtactgccctagagtggaggagatggtgtgagagcagggacgctcctggggcagacccgcatccccagtacctgccctggattcacctcggaaggcaaagagggaaccgttcttgaggtcggtgaaggcgtcgaagggcttcccactgcacagctcctcctctgctgggggctgaggtctccctggatgaagggtctcaggccttgagtctatcccctcaggcttagaggcgcccacctcaggcgcaggggcctcttcctcaggtttcagaacaggtgtctgctcaggattccctttggactgggcctggaggtcagaggtcagggaggggccccccacctgttcatggacagtggcattgtttttctcctcgccatcgtcatagaccgtgtactcatcctccggcatagtgaacacatccccgcgagtcactgcagagagtggatggtagtgagtctccagcagcagggggcaccccagcccacccacctgggctctgaacacaccttggggcttgcactcagccgtatagtctgtgcagcagctctggtagtaagagcagagctcgtcacactggcacttcttgtccacgttgaagccctcagtgcagcggcccttgcatgactctatgaggaaggagtgtcagtcggtgccaccaagcccagaccaccctcgccctccctacattgacccagatggccaccaacactcccctgtaccttggtcagccagagcaacccatgccagcagggccagtatgagaaggggtctcaggggtgccatggcagggcttctagctcagtgcctggcaagctgggctctggtctccctgaagtctccgctctgatgcctgaggaagggagggagaggcagagacagggaaggagggcactggagaagaggaactgccttttctgctgctctgtttgctcaacctccagcccatcccctctgccccctccagcggctgctgcagcaaaggtcacattcctggaacactgggcctgggcgagctgggagataagacctttgccaagctcagaatcattaggtcatcggaaggggaattagcaccgtggatctggagggcagaaagaaggctcattgggcaacagctttatctctctgagtcttagttcattttcagtaaaataggattaacaaagccttgcttcatggggtgttgggagattacatgaactggaccagacaaaatgcccagtagctggagcagccacaaattccttctccaaacatagctattgatccatgattgtttgatcagacacatccctggctgggtgctcattcgccattatttatttagggcaggaaaaagggagtgggaggagagattgtaagcactctggggaattttattttttagcataaaagaacaaagtttcatttctgggttcttctcttgggtgcatcaatctccccaggctggaaatttgggtaaatatcaacccactggactggatttaatttctgagtcttttctgagcaggccactccctgtccccaggctcagtctccccatctgtaaagagtgggcttgttcaacacacttttagactctcgagagaaatatgatccctctacctggaaaatgcccactggcatgaaacacctgattttgtgcccaatttcaggtgtccacagaacttctgaaatcctcccatcacctgaaaaaagtgatcctgagattttagctgactttttctgttctgtaatcagaggggactgtgatttgggccaatttcttcctcatgggcttcagtggagtcagctgtggaatggaacatcaattcccaccccataggcatgttgtgaggtttcgctaagaaacagccataaaagggccttaagagttatgatgattgttttaaccatttagtagggagggggcatccagcggtgttgctcccacgtaccgatgtcacgtggggcggggaggcggggcggagaacggagagcgtcctctcattctccacccccttcctccaagtccagcgcagggggaggtggctgcgactgactgaggggctagggaaggctggccaggggcgtgggcgtggctggggacggcttgggggtggggctgcgcaggaggctggaggagccccgcgggacccagaggcggggcgtcggcccggggaccactgctcctccggggcgtggctgcaggaggctggaggagccccgcgggacccagaggcggggcgtcggccggggaccgctgctcctccggggcgtggctgctgccgagcatctcccagctcagccgagcccgtgcccaggccacgctttgttccagccgccgcctcctctaccctacggcgtccggagccatccctcgcctgctcgctctctcctttcgcccactccctgcatctgggcctgcatcacctttgccaaccgctcccccgatcctgccgacactcctcccccaaacttctgaccggcacccttgcctggtacccttctctccattcctccccctccatcttctttccccgacccctctcgggtccctcttttcccaaaacccgggtctctccgcgtggccccgcctccaggccggggatgtcccccgcggccccgcgcccatggtcctgacgctgcttctctccgcctacaagctgtgtcgcttcttcgccatgtcgggcccacggccgggcgccgagcggctggcggtgcctgggccagatgggggcggtggcacgggcccatggtgggctgcgggtggccgcgggccccgcgaagtgtcgccgggggcaggcaccgaggtgcaggacgccctggagcgcgcgctgccggagctgcagcaggccttgtccgcgctgaagcaggcgggcggcgcgcgggccgtgggcgccggcctggccgaggtcttccaactggtggaggaggcctggctgctgccggccgtgggccgcgaggtagcccagggtctgtgcgacgccatccgcctcgatggcggcctcgacctgctgttgcggctgctgcaggcgccggagttggagacgcgtgtgcaggccgcgcgcctgctggagcagatcctggtggctgagaaccggtgagcgcgccaggccggggttgggagagcgccgcgtggtgtggacagttaagcgcctgcgttcccgtgtgccttgcgccgtgcctttgcctccctcacctctctgactgcctgcactacatctctgttaggggtcagcctgtctgtttcacagataaggaaactgagccttgggaaagtttagtgacttgctcagtggatcacagtgaactaagatttgctcccagggctagtggggtgaggaatggagttacaggacaggagtccgtccctggctctatggatggagatggcatcctattgccaattctccctctcccccgccccccaagcccacagctctccttcccaccggcttgggttcccgtctatgacaccttctctcgccatcatcccatccctctcccaatgagagaagaagggaaacacaacgctcagaaaagagggagggagacctctcctttccctcctccccaggctgtaaggcgtgctggcctgaggctgcttactcccttcttgccgccccaatccaacttctgctccatccttcattctggttcttgcaacaggccagacatgatctcattctgcagctgctgatgggaaacagttttctgctgggaggcatgggtgggggaagaggacaccggggtgcagagcccggcggggaccaggcagagtgtgtgttctctcccttcaccccacttagcaccaagatgccgcaagagggtcaaacagaggcctggttgccactcttgcatgtctcttgggatctctcctggagtatgaagacctccaaggactcactttccctcccttctgatgccagagcagaccaagctgtcacactccagtctcatgctgaagtctccagcttctcaagcttagaagagtttttggaagagtcactttcagctcatgcagctctcacaagtgtgaagggagtgggttgggggtgttttccttgccattttcgaaaagaaaaaaattacctggtgattggtggaaagatacaactgtcaaaaatgcatgaatgaagcaatttaggttgggagaccaagatagggttctgcttatttggcaagccattaacctcccatctgacatccgttgccatgatggggataggccatgaatttggagggggtagcaaataaaatatgtgctcactgggtgtggtggggtcaaggctggtaggtgtgccctgcaggcttgctatgtggagtcaggagctataactacaatccctggagagtgagtacagccagcagcccaaggagaggagggttgcaagatgcaaacagtactgctatatctcaaggttaaaaatggcaattctcacctggttcagagttaccgagagaagagtcactaaccagtgtccctggtctcaagaaacgcacgctggtctcttcaggaccaaggacagagcacaacgtgcgtggttgctatcacaatacttccaaagaaaggcaggatccccgccaggcgccgtggctcacgcctgtaatcccagcactttgggaggcccaggcgggtggatcacctgaggtcaggggttcgagaccagcctggccaacatggtgaaaccctgtctctactaaaaaaaaaaaaaaatacaaaaattagctgggcatggtggcgggcatctgtaatcccagctactggggagactgaggtggaagaatcgcacagaacccgggaggtggaggttgcagggagccgagattgtgccattgcactccaccccacgctggatgacagagcaagactcgtctcaaaaaaaaaaaaaaaaaaaaaaggcactgtctataatcctagcactttgggaggccaaggcaggcagatcacctgaggtcaagtgaaacacaaaaattagccaggcatggtggtggtgcgtggtgtgtgcctgtaaccccagctactctggaggctgaggcaggagaattgctggaactcggcaggcagaggctgcagtgagctgagagcgcgccactgcactccagccttggcaacagagtgagactccatctcaaaagaaaaaagaaggggagggtccctgcaccccttgtaggctgcatgagaatggggctggaaagaagagaaggggagtgacacactgcgaatttatgaaatgtttttctccttcaccaaccaagcccccactgcctcatctcaaagaaggctcttctgggcaagcatggtggttcatgcctgtaattccagcactttgggaagctgaggtgggtggatcacttgaggccaggagttcaagaccagcctgggcaacatggcaaaaacccatctctacaaaaaatatacagattagccgggcgtgatggcatgcacagtcccagctactcaggaggctgaggtgggaggatggcttgagcccaggaggcggaggtcacaatgagctgagatcatgccactgctttccagcctcagtgacagagccagaccttgtcaaaaaaaaaaaaaaaaaaaaaaaaacaattccatcagtgtgcctacccctttttgccacttccctcttgctttcttcttctcaggatgctattgcacccattgtcaaggagcctaggtcacagttttcctgacttccaactaccagaagtccaacagaatatggctcttcaaatctggccccacaacacccagtgaggtccccatatgactgctagccctctatattcacagtccacccccttcaggggatcttaatgaagctatcctcagagtagttaaatggctttcccaggaatattcaatgaataaatggaggagacaggtttttgaaatcacagaaaggcggccaggagcagtgtctcatgcctgtaatcccagcactttgggaggcccaggcgggagattgcctgaggtcaggagttcgagaccactctggccaacatggtgaaaccccgtctctactaaaaatacaaaaaattagccgggcttgatgacgtgtgcctgtaatcccagctactctggaggctgaggcaggggaattgtttgaaccagggaggtggaggttgcagtgagccgagatcgtgccgctgcactccagcctgggcaagagtgagactccatctaaaaaaaaaaaaaaaaaaaatcacgaaagccattgcacataaattcaaaaaagtggaaaagcacacaaaaggtatacagttaaaagttattctcagccaggcatggtggctcatgcctgtaatctcagaactttaggaggctgagacagaaggattacttgagcccaggagtttgattgagaccagcctgggcagcatagtgagagccctgtctcaattttttaaaattaaattaaaaattttttaaaagttcttctcaaccagaccccctctctggagataaaccactataacaagtttcttgtatatccttccagagagagtctctgcatatacaggcatttgcatgtatattatatagacatgtttgcaatatatatacaatcttcccctcctttggagctgggatttgaatccagacctgtgtaattctaaaatatctgcccatttcaccagacccacagcctctcagaccacagaagaactgggagctgggtgagtagttatcacaagagtgcagcacagttccactctgtaaaggtgccaggtgcatagggaaaagtgagggctggggcatcaggagactcaaaataaagtcctaggtctgaattgatatgttcctgagcaagtccttcccttcgctgggcctcaggtaagtcctctgaaaatgagagtgttggctggccaggggcggtggctcacgcctgtaatctcagcactttgggaggccaaggcaggcgaatcgtttgaggtcaggagttcaagaccgcctggccaacatggtaaaactctgtctctactaaaaatacaaaaaaaaaaaaaaaaaaaaagagccaggtgtggttgtacatgtctgtaatcccagctacttgggaggctgagacatgagaatcagttgaacccaggaggtggaggttgcagcgagctgagattgcgccactgcactccagcctgggtgacagagtgagatcctgtcaagaaaaaaaagaaaagaaaaagtaagggtgttggattagataatttccttcttatcttttgtttttgtttttgtttttggtagagacagggtctttctatgttgcccaggctggtctcaaactcctggactcaagcaatcctactgccttggcctcccaaagtactggaattacagacatgagccactgcattcagccagattaaataattttcttattttatttttcattttttgagatggagtctccctctatcacccaggctggagtgcagtggcacgatcttgggctcactgcaacctctgcctcccaggctcaagtgattctcatgcctcagcctcccaagtagctgggattacaggcacctgctaccacgcccagttagtttttgcatttttaatagagatggagtttcaccatgttggccaggctggtctcgaactcctgacctcaagtgatctgcccacctcagcctcccaaagtgttgggattacaggcgtgagctaccgcacctggccacattagatatttcttaaacatatcctggctcttacattctaggcatttatgcagtcagatgtctagaaacgcaaaatgaaggtgaaggatcttgaactctggagacaggcagatctgggttcaaatctcagctgtgcctctcagaaactgtgtgactctgggcatgtcatgtaccctctctgagttttggttttctcattggtaaaaggaataactgggccaggtgaggtggttcatgcctgtattcccagcgctttgggaggccgaagtgggaggattgtttgagcccaggagtttgagaccagcctgggcaatataatgggatcctgtctctacaaagtaaaagaaaacaaaacaaaaaaaatcagccagacatggtggtacatgcctgtagtcccagctactcaggtggctgagttgggaggatgaatttaacctaggtggccaaggctgcagtgagctgtgagcttatggcatgttccggactcaggtaggttctgcagtggacacaaaatcacatgcactatggtcactgtggtgccctttgggcaaggactccattgctggctaggcctctacctctttggcagtaatgtcacctgtggaggacatcactttttttttttagacggagtctcactgtgtcacccaggctggagagcagtggtataacctcggctcactgcaacctctgcctcctgggttcaagtgtttctcctatctcagcctcctgagtagctgggattacaagcgcacaccactacacctggctaatttttgtaattttagtagagatggggtttcaccatgttggccaggctggtcttgaactcctgacctcaagtgatcctcctgcctcagcctcccaaagtgctgggattacaggcatgagccactgcgcccggccatctgtggaagacatcatttgtggaggtcagtaaggcaggaagcctgaacctctaccaggatgtggcaactctcccacctgctcagcaggcctccaagttctctctgttggatctgtcctctccaccacagccagagtgaattttctaaaacccaaatatggccaggccactcccctccctgagagttttcagtggcttctctttgacatcaagataaactacaaatgccttgaggtgcctcaaaaggtccccaggtccgatctcttttcacactctccccttgaatcttctgcctcagccatggaagtgtgggcagctccccaagtgcaccagctctccaacacctccaactctttgcatatacctgtgcctgaaatgcaactgaaatgcaatctctccttctcctcctgactaatgcccacactattctcttgccctaactccataaggaaccattcagtatatctaatgtgtatctttctatctgtgttctgctaaaatctttaaatctttattcttggtcttgtgtgcatgtatttttaatgtatattaatagtgctgtgtcatatagcacattctatttcttactttttcccactcagtgttgggttttattggtttttttgtttttgtttttgttttttgttttttgggttttttgtttgtttgtttgttttgagacagggtcttgctctgatgcccaggctggagtgcagtggcccaatcatgactcgctgtagcctcaacctactgggctcaaactatcatcctgcctcagcctctcaggtagctgggactacaggcctgtgccaccatacatggctaatttttttgattttgtagagacagggttttgctatgttgcccaggctatgttgtccaggttcgtgttgctgtgttatcacctgctcagtcacttggacctccctgcaaatcctacagagtaggcacctgcccatgttacctgactctccccaagcttgatactgattgcctccaacttcctcacactacaaatgacactgcagtgaacatccttgtctaagtgcttttctctatctatatgacaatctctttgggagaggttgcctgtattgttcagcttctgattttgcccatctaacaggtgtaaagtggtagctggttttctgtttgcttgttttctgccagtgaacattttattcaaggtatgtgtgtggagagtggtcagggacaaaggagagtgggaatggcctttgaaataaaataaaatgatttaggtgaagaaactctaggaaagggtaattttctccatttagatctttttttttttttttttttttttttttttgagacggagtctcgctctgttgcccaggctggagtgcagtggtgccatcttggctcactgcaagctccgcctcctgggttcacaccagtttcctgcctcagcctcctgagcagctaggactacaggcacccgccaccacgcccggctaattttttgtatttttagtagggacagggtttcaccatgttagccaggatggtctcgagctcctgaccttgtcatccacccgcctcggcctcccaaagtgctgggattacaggcgtgagccaccgcacccggcctagatcattttaagaaagaaaatgacagataaggtttctggtctatggaactaacaaacaagtagactattaatataatatcagatattaaatgccctgaagacaataaaataaggtaatgagttagaaagtgatggggaaaagcctttagattggatgattggaaggaagtaacatttgagcagacattggaatgacgaaccatgaagcggattttgttgaagaacatttcaggtagcgatagctattgttttaattttcatttctctgattactaatgagttagagcatctctttatctggtttttcaaattttggatttcctcttgtcaattgcctgtttatgtcctttgcccattttcttttgaatttgttgcctttttcttcttgatttgaatatttgctgatatattctacatataaacccctcattgatttttttcttttcttttttttttttttctgtctctctctctcttttttttttttttcttttgacacagggtctcactttgttgtccaggatggtctcaagtgagcctcccaccttggcctccatgtgccaggcattgtgccaagcattctacaggcatgagccaccttgcccagcctggttttatattttccctttttggttttagacatcgcaatacctctggcattctttctattcctcaaacacgtcagctcctctgccctcaggccttcatccttgctcctctctctgcctgttatgctcctcccagatatttgcacacagggatttcttcacattaagcttagatgtcacctcttcccacatacccctcctccaggcacacgccattacatcatcctgttttgctagcgccaaggccctatcactacgatctggttcactcattgttttcttgtctatgtcttcctccatcgccctgaggataagctctggccagtctctgttaaacctcagcccctagtgcagtggctggcacaggggacgtcctcaggaagcatctgttgaatgaatgaatagatatgccccggtcatgggccatggagtgaggaaaaggcaaggctaagagtggtgtgcttcaagtgacacttcaaattaggacaagttaatatttgttgagtttttaccatgtgccaggcattgtgccaagcactctataaggcttatctcattagtcctgataataatcctatgaggcaggtatttctattttctatttatgagataaggaaagcaaggtagagagataaaggaagctgcccaaaggtctcctttatcccagttagaaaacgggctgagaagaaaccaggacccaggggatctgctcctgagctgaggctcttagccaccacacatactgcctctcaaggggaggagggagggggagaacggctatggccagaatagagcacccttagaatccgagaagtggggtcctcccaggggaggagatgagggtggggagcagggaggggaatgctctcccctatatgaggccggtgaggcccagagagggttagtgaccaggccccaaacgggcaagccaagctccccaagctgcggcaattccactgtccccttccactttcactgggcagagaccgcgtggcgcgcattgggctgggcgtgatcctgaacctggcgaaggaacgcgaacccgtagagctggcgcggagcgtggcaggcatcttggagcacatgttcaagcattcggaggagacatgccagaggctggtggcggccggcggcctggacgcggtgctgtattggtgccgccgcacggaccccgcgctgctgcgccactgcgcgctggcgctgggcaactgcgcgctgcacgggggccaggcggtgcagcgacgcatggtagagaagcgcgcagccgagtggctcttcccgctcgccttctccaaggaggacgagctgcttcggctgcacgcctgcctcgcagtagcggtgttggcgactaacaaggaggtggagcgcgaggtggagcgctcgggcacgctggcgctcgtggagccgcttgtggcctcgctggaccctggccgcttcgcccgctgtctggtggacgccagcgacacaagccagggccgcgggcccgacgacctgcagcgcctcgtgccgttgctcgactctaaccgcttggaggcgcagtgcatcggggctttctacctctgcgccgaggctgccatcaagagcctgcaaggcaagaccaaggtgggtgcagatgtggggttgggtggatcaggggttagagagcctttgggaaggtttcccagaggaagtcacattcaaccgggtcttgaaatacacatcagaattagatgaagcaagacaaaggaggagcgggccagtcattttggcgttgaaggcaaacccgaagtttggacttggttttgggggcaagaggaagacactaagaagcttttaagcaaggggacacttgtgttttacaaagatcatcctagctgctgtgtggaaaggggcttggcaagggtgaggacggaggcaaggcaacccaataaaaaactatgacttgcaggggtgggcgttgggggaagggggagacagcgatgccagtggcagagagcagattcaagagatgtttaagagatggagttagcacttggtggctgggagaaggagaaagaggagctgaggatgactcctggccctgaacataggcaatgaataaagtgaactgggtgagagacaagtggaagtggggaaggggaagaaagtgacttctgcaggacatatggagtttgagatgcctgagagatgcccagctggggagcttcagtgggtagtgtagccttttgagtctggagtcaagatggctgttagagacagaggcttgcggcttgggacaggacatcagtgtgtcagccagataacccccatcggagtcccaaggggtcctcatgtccagggcctaatccaccagtgacctttgcccactgctttaacttgctgtgtgaccttgagcacctggcttcccctctctaggcctctatctgggcctcatttttatcttctggaaaattcagtaaattggaccacagcagcagttcttaccctagatgtgggatagttttagcaccacaagtttgtggattgtactttttggaaacagagatctactatattgcctaggctggcatcaaactctcaggctccaagcgatcctctctgcctcagcctcccaagtagctgggactacaagcacgcaccacaatcccccagctgggctttgtttttaaaatgttacaggttgaagattctccctacaatatcactctctcttctttgcatttttttgtggaggcttggaggttggtgatagctggtgcacagagatgtggtgcataccccatgacccaccttgtctgtaccccagctgtcatctgggggtgctcaaaggagtgtgtcttacagatgattgtcacccatcatgtatgtccctgcagatcaaaaagagactgctggctgggtgaggtggttcatgcctgtaatcccagcactttgggaggccgaggcaggtggatcacttgaggtcaggagttcaagaccagcctggacaacatggtgaaactctgtccctactaaaaatacaaaaattagctgggcatggtggcaggtgcctgtaatcccagctactcgggaggctgaggcagaagaatcacaggaacctgggaggcagaggttacagtgagctggaatcgcaccactgcactccagcctgggctacaaagtgaggctccatctcaaaaaagaaaaagaaaaaggagactgctatgttaggggggtctctggggcctctttcaacatccagtgttctaggaacttctgattcttctctctgcactccagagctgggtcagggaggacctgctctacaaggcaggtcattttgcttagggaaaagggtcttaaaggaagtagggagtgaggaccccaaggattggatctgggccgcaaccatgatcaccagcctgtcacccctttcccatcgaggccaagtgagtgtagttcaacaaagacatctcgagtcccactctgtgtccttcatcgtgccagatgcaggtttccagtagtgactaagacatgtcctcagcttatactccagtggaagttgcatcgtcaaccagtgacagtggcattcagagtgtggtataagacctcattggaggtgtgggccaggatgtgggggaatcaaagcaggctgcatgaaggaggtgctaatcaatttggattctggtggatgagtaggatttccgtggagtgggaggattcccatgagcagactggaagaactaagggtttggaaacatagtgggccaagacccagaggtgtgaaagccttggaatgtgtgcatgtgcgtgtgtgtgtgaagtgtaagttagtggaaggtgaggtgaactgggagtgatgggcagctgcactgtgccctgcctggcgctatgctgagagctcaactttattccagggccggtggatgctgtagaagggatataaaggagggataggcccctccgcccccaacccatccgagtcaggacctggtcaagaattgagagaacttcaggagggggaatccgcaggaccccatgacttagtggctgaaggtggggccagggcagatggagagactttgggttgtgagaagagacaaggagagggactgggcacgtgtgggagcacctggagagctggtgggacctacagccctctccccactccctccctaggtgttcagcgacatcggcgccatccagagcctgaaacgcctggtttcctactctaccaatggcactaagtcggcgctggccaagcgcgcgctgcgcctgctgggcgaggaggtgccacggcccatcctgccctccgtgcccagctggaaggaggccgaggttcagacgtggctgcagcagatcggtttctccaagtactgcgagagcttccgggtagagtcgcgtgggatacgcctcccccgagtcagagcgggcgccctgtgcacagggactgcgttccctccccgcctcgcaatcccgcggcgccagggtcgcttttgggggcggggagcctgtacgcagccaccgttagggtcactcggctctgatctaggtcccatccgcctcctccacgccatctccagttccttcccttgcatcttgtgctcgaggtccaagggcggagtagcgaagcccttcctgacacccgactcctcccccaggagcagcaggtggatggcgacctgcttctgcggctcacggaggaggaactccagaccgacctgggcatgaaatcgggcatcacccgcaagaggtacggagcctcctgcccgccggaccccagctaggtctaaataagctccccctccgcccacagcccgtccgagtctggacctcagcgtcttctcctccgtggggtgcaggttctttagggagctcacggagctcaagaccttcgccaactattctacgtgcgaccgcagcaacctggcggactggctgggcagcctggacccgcgcttccgccagtacacctacggcctggtcagctgcggcctggaccgctccctgctgcaccgcgtgtctgagcagcagctgctggaagactgcggcatccacctgggcgtgcaccgcgcccgcatcctcacggcggccagaggtcagcccgctcacccgggaccccgccccagccccagccccagccacggccctggaatggtgaggggagacacggggtggagccttccagcctcgccgtggattgattgagcacaaacgtgggtcacactgggctctgaggatgtaaagatgaatacgttgcactttacctcaagaagttcccagtctgaggtgggtaggcggtgggaggaaggaggctattaaacaggcaagcggccccggcaggaagctacccaggtctccagtgggagcacagaggaagcccagcccaccccatccacccaggtctagatttcagagaggacaggatgcctgaccatgtcttgagaggtgcactggcggggaggggtggcaacaggaagggcagcccaggcagaggcagcggcctatggagagtccatgcagtggggtgtaggcgggaagggtgtgcgtatgtgtgttatcctattggccaacagcttacaaaatttgggtctagaggtggtttagagtgaattctaggcctctagccaccctccttatttactaatttatttttacttactaatttactacttagctaatctttattgtcaattacaaggtactctgtttggtttttaagatattatcccatcagtctctatattgattctatgcaatgagtgttcagtttttaaaatcaaccttaaagaactcttgaaagaataaaaagaggagtaagtgtccagtttgagggccgggcaccgtggctcatgcctgtaattctaggactttgggaggccaaggcaggcggatcgctcaagtccaggagtttgagaccaacctgggcaacatggtgaaagcccatctccactaaaagcacaaaaaaatacaaaaaattagctaggtgtggtggcgcatacctgtagtcccagctacttgggaggctgaggtgggaggatcacctgagcccaggaagttaaggccgcagtgaactgtgatcaggtcactacactccatccagcctaggcagcaggagtgagaccctatctcaaaaaagaaaaaaagtatcagtttgaggagttttgaaagacatctgtgtgaccccccacccccaccatcatcattaaagatatagaatatttccatcatgggtgttccttttaaagataatgaaactaacatttaaagaattcaaatacatttcccacagtcataaaagtcattagatggcaaaactgggacttgagcccttgtctttctgcttcataaacaaacaaatgttgtctatgagggttatgtctaaatattataagaagatgaattcttttcattttatcctttcattcagcaattacagactaagcacccacaagacacaagggactgagctttggctgcattcttatgcttcaaccaaagcaggttggcttttattatttttacattgcagctcccattaaaacttcaagatttcatttttattataattaattaatttgagacaaggtctcattctgtcacctaggctggagtgcagtggcgcaatcacaacccactgaagcctcaacctcccgggctcaagtgattctcccacctcacctcccaagtagctgggaccacaggtgcgcaacaccacacccagctaatttttttattttttgtggagacagggtttcactatgttgcccaggctgttctcaaactcctggcctcaagcaatcttcccaacttagcctcccaaagtgttgagattacgggcgtgggccaccgcacccagcgcaagatttcatttttaaacaacaggaaaatcctagggcaaaaatagcttacaaaaaatagtttgtatagtgagtagggagccatgcatagtttttaagtgggaggaatgacatgctcagatttggattttagaaagatgttctggtagctgtggcaaatggactacactgggcaattcttttcttttcttttcttttctttttttttttttttagtcagagtctcactctgtcgcccaggctagagtgcggtggtgcattcttggctcactgcaacctctgcctcctgggttcaagtgattctcgtgcctcagcctcccaagtagctagattacagacatgtgccaccatgcctggataattttttgtaaagacagggtttcaccatattggccaggctggtctcgaactcctggcctcaagtgatccacccaccttggccccccacagtgctgggattacaggtgtgggccactgccctggcctagactgggcaattctagctgggtttggggaggccattgaggaggctggcattggaaacctgagccagggaagggcccggaggctggagtccagtatgtttagtaggtagaatcctcagaatgcggtgcctggcgcttagtactgagcgtggctccagaggagcagagtgctgtctgttttactcactgctgaatctcaagcactgaagacagtcctggcacacagcaagtgcttaggatgtatttgttgaataaattaaatgggaggcaggagttgaggctgatacccaggtgtctggctttggtgggaaatagggaagaaggaatgagggggagatttggggtgtgttgaatttggagtgattgtgggcagctggctgttcaggtctggagttccagagagaggtcagggctggaagtgcatgcatatcaatgtccctagaacacagtgcctgcctcctaagaggaacccaacaataacatgaccttcctcctggaggccccatttctcctttttggggcaggccaccctccccaggctgggctgagagggcttggtggactggggactaagtccacaagggatgatatacctgacagtgagtgatgcggaggggccaccttcaccatgctgcctattgcccacttcagaaatgctacactccccgctgccctgtactggtggcaaacccagtggggacactccagatgtcttcatcagctaccgccggaactcaggttcccagctggccaggtgaggaggggcgggcgggcagcgacggggcgtggggacaaggctgtggcactgacacaggacttacttgcagtctcctgaaggtgcacctgcagctgcatggcttcagtgtcttcattgatgtggagaagctggaagcaggcaagttcgaggacaaactcatccagagtgtcatgggtgcccgcaactttgtgttggtgctatcacctggagcactggacaagtgcatgcaagaccatgactgcaaggattgggtgcataaggtaggtgcctgcctatgcttctgcggtcccagcattggcctgtggtccagaagatagggtcgtcttctattccttcttgtctgcacatcccggcacacttagccctgaagcacctccttggcccagctggaagtcaggaaccacagctctgactgtaataggactttagcaaaccacaagggacaagagactaggctttggctctctgagcctcagttttctttttcttttttttttttttttgtttttgaggtagagtctcgctctgtcactcaggctggagtgcaatggcgtgatcttggctcactgcaagctccacctcccgggttcacaccattctcctccctcagcctcccgagtagctgggactacaggtgcccgccaccacggctggctaatttttttgtatttttagtagagacagggtttcaccgtgttagccaggatgtgagcctcagttttcttttctgcaaaatggggtaacttacctgttccactcaccttatagaactgttgtgaggatcagagagacataaaaatgctttgaaaaataaattccatgagagacaggagagcatagcgacaggcagaatggaatagttgttgagagctcaaaactgagagtttgaatcctggctctggccttgggcaagttacttaaccccgataagcttcatatttatttctggaaagagggtataataatagtatctaactccctagaacattgttataaggactaaaaaagccaaaatttgtgaagtgcttagcagaatggctggcacatagtaactgctcaataatggtagcaattattattattaatataattattataactactatatctgtttaattcatcattgtattttcagtgcctgacgcattgtaggaacttattgaatactaacagaatgcattgatggatagctccatattgcatcttcaggttattaatcattaatcggtcagtaggaattggagttggggctgagggatgcagtagtcatctaagagacaggatgagacaagcagtcagctcagagacaagaatatgcccagagggctgggcacagtggttcacacccgtaatcccagcactttgggaggctgaggcaggaggatcacttgaggtcaggagttcgagaccagcctgggcaacatggtgaaaccttgtctctactaaaaaaatacaaaaattagccaggcatggtggcgcacacctgtaatcccagctactcaggagactgaggcaggggaatcgcttgggcccagaagacggagatcacaccactgcactccagcttgggcaacagagtgggaccctgtctcaaaatgactagatcgcatacaagttggtgtaaatgctgagccaggtaagcaaacatcttgcttgccacaggggtttggagaagggagagagcatcaaggtgtcaacgaaaagagtcagactctatgagcgaccatggcctgtgacacagccctcaggagaccctgagaacacgtgcccaaggtgatcagggcacagtttggttttatacatttttgggagacacgagacatcaatcaatacatttaagatgtacattggtttggttcagaaaggcaggacagctcaaagcaggggcttccaggctataggtaaattttaaatttttccagttgataattaattgagtttatctgaagacctgggatcaatagaaagggaatgtttaggttaagataaagggttgtggagaccaagttttattgtgcagaggaagttctcagggcagacttcagagggagtaggttataaaatgtttcttatcagacttataagggtgcctggctctttgttgattatctcctgagtccggaaagaaaaagaaaaaaatggggggaaggggattctctatagaatgtggccttttcccacaagagacaaacttgtggagcaatttcaagatatggcagggaaatatatttggggttaaaatatttttatttcctcccttattatgtgatgttatgctagagtcaggttagaaagcagaccacgctatatagggttaaaattaaaacctcctccgataagactttatggtttgtagggcatgactccctaggctccttaggtaggaatttgggcaagataaaaaaaaaaaaaatcagagtttagtcctcaaaggactggaataatcagggaagacttcatggaggaagcaggtcttgagaagaatcttaagaatctgggtaagtggaatagaaggcatcccaggccagggtaacagcatgagcaaaggaataaaggtagggaggagaacagtgctgaaagcccacatacatcttggtactgctttctccatatcacagatgaagaaactgaggctcagaaaagtagaataatgttcccctggctgcactactagtgtagaaatcagaaaagctaggcttcaaattccatctatctgactccaaagctcatcactttcccaagatccacactgcattctatggcacagctctgagggggtgtgaggggaggtgatggggtagggctggattcggttgacaccagagatgattgtatctcttcacaactccacatccagtgatgtcatgttggtagcttgtcatcagccatggtgggagtatttacaccaaggaaattggcaaccactacaaatcaaagttttgttagtttggttgattggctggttgggttttcttcccccatgaatagctagttactataaagttagcagcacaccactggctggataagaaccatggaaaccaggtaaagcagtgtctaaaggcaggagaagacctgtgcttaaagcactggaaatcaaggagcccatgaaggagaagatgccagggcggtgggtcttaggatgaaggctctgacactggaatgcagtccacatggagtgtggagtcaagccccagaggccatgtaggaggggctgagtactaggcctggtttggggaggggcactggggcagttgagcatccaggaagaacatggctgataacccagagcacgtggcaggcagccttttgagagaaagaaaagagtgtctgtgagctccatgagacttcagaccttgcctcattcatctgtgtccctggtgcctaaaaccatgcatggtacaaaggaggctctatgcaattgcaccaaaaaaaaaaaaaaaaaaaaagagagagagagagaggctgaggctgtagaggagtttatagaacaattgaatcaatgattaagcagacaagtgatactgatgaagctgagatgccatgcctgggagagccatacatatctagtagatttaccaggttagaggacttgactccgtttttttttttttttttccagtagagatagggtttcgctatgtcacccaggctggtcccgaactcctgagctcaagcctggagttcagtgcctgcctcggctccccaaagttctgggattagaggcatgagccaccgtgcccagccagaggacttgactctaattgttttcgttctcaaccagctaggtgatcctgaacaaaccattatccctttcttttatttatttaattatttttttttttttgaggcacagtcttgctctatcaccaggttggagtgcagtggtgagatcttggtcggctcactgcaacctccgcctcccgggttcaagtgattcccctgcctcagcctcctgagtagctgggactacaggcacacgccaccatatccagctaatttatatatatatatttttagtagagacggggtttcaccatcttggccaagatggtctcgatctcctgacctcgtgatccgcccgccttggcctcccaaagtgctgggattacagacatgagccaccacacacggccgccattatccctttcttggccagcctctgaatctgtgcgatgaataatttgtactgtctttggttttgtataattctggatgaaacaaatttctaaaaatttccaaataaattgctgcaggctcaggattcattccaatgctcagcagaaaggcagcagggcttggctgaaacagcctggacttggactctcgaggcttgagtcagaggaccggcccctcgtgggctgggcgtgtgtgtggcttaggaggaaatcccttcctctctgggcttttttctctccatctgtaaaatggagcggctccccaggaagccagtcaaggacgaagttacgcatgttctttccccaggaaggctccacttcccaagaatgcttggcaccccttgtcgtcccagcagatggcaaagaggtgagaggagcctttgtcttggaccggccccagaggctccgtcatccctctttggttgtttctggtgcttaattgcctctggttttaaaactcctttccctgaagccacattagtgggtaatcaatagggaaaaaccacaagtgaactgcactcaaaaaagtaaaatccctttggttccctcttgagaggaagaaaaacattcaataagcacttaatggaacccgattactagcaaataattcctcagaacaacgctttgaggtaggttttattatccccactttacagaagaggaaataataacacctattacgtattaagcatacactgcatgcaaagcactgttctaattacttgccatggaatgttgcgcttattccatggaacaatcctgaagacagggactatcattaatcctgctttatatattagaaaacagaggaacgagtgtggtagtgcaggcctgtgatcccaacactttgggatgctaaggtgggaggatcacttgaggccaggagtttgagaccagcctgggcaacatggtgaaaccccatctctactaaaaaatacaaaaaattagccggacatggtggcacacgcctgtggtcccagctacttgggaggctgaggtgggaggatggcttgagcccaggaggttgaggctgcagtgagccttgatggtgccactgccctccagcctgggcaaaaagtgagatcctgttcccctgccccccgccaaaaaaaaaaaagaaagaaagaaaagagaaaacagagactttgagaacctattatttttgcctcaggtcgtagagcctgtgtcagagactcagtgcaaaccccgatttgatgattccagagtgcagccctaactgctgtgctatgttttctcattcattcattcatccatctattaaatatttagcaagggctaactataagggctttgtgaaagatgctgagatataaggtcagtgaaaaatagatatgatccctcctcatgtctggcagagaagacaaatactgagtaatttacccattaattaattaaaatttgcaactataatatgttctgcagagcctataataggggaactgacttggtcagggcagtgggagacaactgccctgtgtaagagttgattgagctcagatcagaaaaatgaatgggcattatcaagggggaaggacaaggaagcttattttgtgtgtctgggaggacagggcaggggtagagtttgagaagtggactgtggccaaccacatagggtctcacaggccacatgaaggagtttggactttattctaagaccatgcaaagtcttgaagaattttaagtagggggtgacaggacctaatttgtcagatgtgcattttgcaaatattagctacatgaaagggcaatgtggagagtgaattagagaagacaagcgtggatgaggaaagacctggtgggggcttaaagataatggggattggaagagggtggtagtggggtggaggtagggaaaaatagtggatttgagaaataagtaaggagtacaattggcagggcgcatgatggatcaacctgtacgcaggagtgtgatgtttttcttctgacaccaaattgtttggggtttttcccacactaaccactaattctccagcttgccaacaccaactgggtatcccgcaattcaattcaattctgaaatgtcagtcacgaggcccaggcccccaggctgccacatttctgtttgatttggctacaaattcgggggtgcccatgacaccccgagattcaatttgccagaatgactcacagaactcaggaaagcactttacttactattagttgtttattatgtcaaccttaaataatgagattcagaaaataagactaagtatagagtttctttgagtgcaaagtttgagaatagccacccagtaagcattgactccaaaggcatggggtgagcattccaaactggagaagttaaggtttcacttccacaggcaaagagagaggaattttagcaggattacaacattttccatacaagaccagtgcgtatgttacagtgctttgattggttatagattgctacattccaaggaagatgactttattaccccctgagaaagggtggtgatctaagtggggatctaagggagtcttatctctggtgccatttggtcttcctaagtaattacagaaaaaaaaaaaataggtggaagttgcagctgcatgccccatgactcaggctgcagagaccaattcctgtcaaggctcagaataacttaaagttccaagagctttaggtttgatttaacaaagcttgaataatagtaataaataatattattaatctcaaaatcctgggctcaagtgatcctcctgcctcagcctcccaaagtgttgggattacaggcgtgacccaccatgcccagctgaattatttaatttcacagttataaaggacacagctcaagaatagccaaatggaagagatacataggatctctacgtatggagggtggaggtgtggatgccatgccttctaccaccttcccagcacctacacctgtttatcaacctggaggctcttcaaaaccccttgtttgggggtttttatggaggttccattatgtaggcatgattgattaaatcattggccattggtgattgaactcaatctccagcacctctctggaggctgggaggtggggctgaaagttccaatcctctagtcatgccctggtctccctggtgaccagccctcttcctgaaactatctaggctacccccatagcaccccccgggcccccagtggggaatcatctctttagcatacaaagacactcatcactcaagagattccaagggttttagcagctctgtgccaggaactctgggcaaaggaaaaatatttattttttattacactacaagggttaaggtagacatcaaggtggacatcaggactggtgtcctgccctgggcccagcctcgggccagtgggcctcccagcacctgcctggctacaagggtccctagatgggtacaggggtatcttcctcctttcctttctttctccaggagattgtgactgctttaagctgcggcaagaacattgtgcccatcattgatggcttcgagtggcctgagccccaggtcctgcctgaggacatgcaggctgtgcttactttcaacggtatcaagtgagccccagggccctgggaccaggggggtagggtacaaatcaccatgacaggcagagtgtgggcaaacagctgactagcagctccctctgcccagctgtctgaaccacattggctcctgtgcccacaggtggtcccacgaataccaggaggccaccattgagaagatcatccgcttcctgcagggccgctcctcccgggactcatctgcaggctctgacaccagtttggagggtgctgcacccatgggtccaacctaaccagtccccagttccccagccctgctgtgacttccatttccatcgtcctttctgaaggaacagctcctgaaaccagtctccctgggctgagacaacctgggctcttcttaggaaatggctctccctccccctgtcccccaccctcatggcccacctccaacccactttcctcagtatctggagagggaagggaagtcaggcttgggcacgggaggttagaactcccccaggccctgccattgggttgtctgtctccgtcatggggagggtccctgctcagttctggagacactggagttggggtgggggtggttctgcattcccttctcctgctgatagcagtcagcttgaggaggatgacggaaggcagcctcagacaggaattaaggcaatgcccaggcgggcctgggcactgtattctgagcaagggcctgggcccaggagccagccagggatgagtgccatcatggctctccactcagactgtgcctggcccctgcacttacaacttcctgccgctctgtggccttgccctgtaatcactcagtgcccttagctagcctgactaagtcccagatcccctacagcttccttcggtgtggtatcttttgccacatccagggcgagggttgaggcaaaccagccctccctctgacttccttgtcactgcagccagctttgctgcacttgctggtgcacaggagcctcctgtttgggcctgggtctgggcatggggaggccgtgcctcaaagcccaccctaccccatgccttggtgctgtgcctcaggctccttcctggtctggcccagctggcttccccagcccctcagccatccagggctacccactgcttactcagggaccaggcagcccccatggcagtaaaagcagcctagacagaacctgcagctctgtggaaagaggcaaagtcctgaaaaggcaaagggttgtcacttagggcagcttctccaactttaacatgcatccaagtcacctgggaatgttgttaaaatcaggagatctggggtggggcctaggactctgcatttcttacagattcccaggtgagctgatgctggtggttaagggtagcaaatctctaaagcacgaagccctcacaaatctttgccatttcccaaacactccgctccatggtctccagtcatcagagcaactctacctggtattatcatccccattttacagataatgacactgaggctcagaaaggttgaggataagcccactttcctgtcattagtggcagccccagatccagacctaggcctcctggcacccagtccactggcagtggaattgctttcctgagaatcattctgaggctgggctattgcttctcccttgcttcaaagaatctagcagcgggggataggattttgcaacaaaaagctgacccagaggccatacagagcaggaatatcccattgccccctcctccactgggttcagagggtaagaaagcaccctccaataaacccaggctccaggccgtgggggctgctgaaggctctttccccgcaagggccaggtgttgacaccttaaagctggctgcgcccccagccccactcttggctgtgctggccaggtgactcctagttcttggccacatcatcagaaagtcaaaggtctcactccaggtttggggctccttccttccactcccctccctgccagagtctgtcttggccagtgccagcctcgatgctttggttttgaccccacctgatcctcctttcctcatgcagcacaagtgctcaccggggccagagccagggcatggatatgacaagcagggcagcctggacactgccctcacaggacagcgccaataacaatacagtgtctgagtatctccaggggatgatttctggctctttgtctccaatcagtcccactccctcctgaggtccccaagggcagtattcagagaggtttcctgcgttttatttctatttggtataccctccactgttgtccactgccctgtgtggccttctggttgacctctgcccgatcttctgtctctctgagggaatcagagtccagcatccagccccagctggaacagctgaagtcacaagcctcctctaagccaaggccagtgtgttcagaggtgactgccacccatactaggacaaacacagctcagatcaccaggtcaagcacctaggcctggcttctcctgagacagaggactcagaagtggcctttcctccaaagcctgctcagacacaggtctgtagggccagggtgttctgcttggctgggctgcagctgctacccctcggttggggctgagtcagccagatcctccccctacttctccccaagggccaagaactgctcagggacattaaaggtcaaaagtccagccacactcattcatcctttccccaggcccatgaagagaggcatctcattgtagaatgtatgaggaagtgggaagtatctcagagaatcagctaagtttcctaacttgtccatccaaatgtgatcaccacgattcaacaatttggggcattgctgatctagccgttcctagtggggcttgctcaaggttgcacagcgagtcagtagaagccctggctggccccacttggtaccaatccaccaggcagctcagggctcctgcccagcccagcagcttctgttgtctaacgtatggcaggcagactgggagcaggaaaacagagggccccaaagcccaaggcaccagaaggtttgtttcagtttgctgaagctgatttgtaatgattggcactcttcagccaggggagtgggtaggccatagccaaggatcgattccccaaccacagcaaaggcaacactcttcctccagagatcaccaagcccctcttacctccctccctccttcccaaggctggcactaaccaggtaccacattcattgttaaggaatggctgatgactgctacacgtgttgggaacctggttggggctgtgcagtttgggctggaaggagagatgccagccctcgtgctgcctctggtccctgaagtgtcacctctctcaggacctctcctctggcctgtggggttataagtgatggatagcagaaagggagaactgactcctgtcccaaatagctcctctgccacctgtcctgcagtgggcctgtgtgggttatgattctagatcctagacagaggctgggtcagctgtggatggggtggtgccttggtctctcttgactacctcgtccaaagagagcactgcccttagacaagagttgcttgtcctgctgtgggctgggcttccagctgcagacctccagttgcttggtgttcactttgctcctcttgccctctgtcttctggtccaggcagatcaggggctctggggaaactgctggaactcgaggtgaggatcagccttttccagcatcctgtgagagaccagagagagagtttggatttcatgtggggaaccctcaaggcctgtctggagaagtgacacaggatttactggggtgggctggtccaggtagctctcctgaacctcctccttccccaagctgagaagctgagagctggaggacaatatccagggacatggctctggaaaataacttttttttttttaagagacagggtcttgctctgttgtccaggctggagggcagtgacataatcatagctcactgtacccttgaactcctgggctcaagtgatcctcctgcctcagcctccttagtagctgggactaccagtgcataccaccatgcctgggtgattttttaaattttttatacagacaaggtcttgctatgttgcccaggctgatcttgaattcccgggctcaagtggtcctcctgcctcagcctcccacaggatcgggattacaggcaagagcctccacgcccggccatgaaatataattcttaatatcatacaggaaaaagtcagcgggtcaagctagcctgtggcccagccacaactagctgacaaagcttcctggccttccctttaacacagttctgctgccatagttccatctataaaatgggaatggagggaaataggggaactgggagagagaacacagccttgccaagcagcaatgttagcctgatccttcctccacctagctcgccatctcgcccttggaaaatggctcctggaggattaggcagccatctgcaaggagaggggcaacctgggacaagacacccagagggtaaggattccaggaatgaagctgccatttctggttgggaggagaagaggaaacttttaagagaaagggctccattatgagcatgggttcagggccctgcattacccaatcagaacagccgggatgagcaggaggccagctcccaggaggaaggggaaccccttcataaagttcagagtggctgggtagagtgagttgaagatgccggaggccgtcagcatggccaggctattcacacaggccacagcagaaaagagagcacctgtgaagaaataaataccatactctggagtccgaaagggccatattccaactctggcaccaccacctcacagctgtgtgaccgggagtagtcacttaacctatgtctccccttcctcaccagtaaatcctgctacatcatgtactgtgacaaggattcagtaaggtcatatgtggacagtagctggcacagaggggctactaaacaaatggctgctattaaatccacattaaaagtacatgtgatctgacagaacccagcacataaaagaaaaaaaaagtacatgtgatattgtctgatgaaagcttgatggaaatggcttttttctggtttatcctctttggaatcatctcctgtttgggattaactgctggtctgatcagttccaatattcatagcggtgtcaccactgaatagcttcttatcctttgggttcctgttcctccttctgctaaataaggataatacctatttcctagattgtgagcaacattaagttcacatggaaatcacccatcactgggcctggtcccctggaagtagctagttagtaagggctgttcttttctcctgtttctcttgacatctctgggcacagagaaagtgctgggaaaaaaagtttaggtgaatgaatgaagacacatggattctggggacaccagaacccacagtgggctctgtatggcaccagagtctctgtcatcatcagatcctcattccaggacagatggaaaaagatgaatgtttccagactggggcataaagacccagaggctggagaagctgttctttatagatataccaggagaacccacagtttacaaaatgtgcaacaacccaacagaagttgagattaaattctgtcacatctagaggggtctgtgatgtcatcaaaagcaaaccacccacatcacagatgaagaaacaggcctgtggcagggctcggactaaaacccagatcctgagaccagctgcttttaaacacagacgtaggtttgcatcctagctccaccatttactgagtaaccttgggtgagccaatgtaaccccctgggtctctgtttctttatctgtcaactgtggaaaatgaaacccatgtcacaaggttgttcacttctgggcttgtacacgctgaccccagagaaacagggaactctggcatcaccacacccatcttacagacggaaaagctgaggtctgcagagagtaaatcctctgctctggttatctagaaagaacataattgtgctctgctgactgcaaatcccaactctgcggtttgaaaatccaaggtggcatgatcctctgcccattgtgggcaatttcacagaaatgtgtttgttttggccacttacttctccagggtgagaggggggaaggcaagctgttcccccagccatggctgcccatcagcccgtttcgggcagcactggacatgaggaaccagacacaggtgggttctgacactcaccctgctctgtctctctcaccagcttggagagtttagcccggatgacaggtgtgatgactaatgacaggaaaagcaacccatatcctgtggagaaacaaacactcatcaggaaaatggggctggggagaggggcgtccaagggaaaggcagcagagctcctatccataccccacgtggggcttaggttagacccaggaagaacttccttgatggtgagggtgggaagacagtagtcaaggaggaatggagactgcccttgtctgggcttggccacctgctagctctcatgaatgaatgctaattcccattgattgctttcttgtctgaacctcttgtggtcacagcaggcatcacccacccacttggcacttagtagggatatggcagggcacagaaaacaagcatgggctttggagtcagccctgagttcaaaacctgatgccattacatattatctgtgtggcctggggtacttaccctctctgatcctgactccctgtatgaggaagataataaggccttcatcacaggatggttctgaggcataggaggctgaataatggtgcccaatggcatcagattcatagccctggaacctgtaaatactaccttatttggaaaatgagtctatgcaggtgtgcagttaagcctcctgagagagcagagttatcctggattaggttgggccctaaatgccgtcacacatatctttataagaggaaagcagacggagatttggcaccgacagaattgagaaggcacaaagaggaggagagtcaatgtgagcacagaggcagagactggtgatggccgccccaagccaaggaatgccagcagccccagaagctggaagaaatgagaaacacgttctctcctggaggcttgcaagggagcactgcctgctgactgcttccattcagcccggtggtactgactttggacttctggcctccagaactgtgagagaatatgtttctgttgtgttaagcccccaagtttgtggtatgtcattacagcaatctcagggaaccaatacatgaggtaaaaaggtaacatctatgaagagcatggcatagggacacagcaaatgggagttccttttccctttgcattcagttacttacaggcttcctgttttcttcataaccatttctctccctgtgcgactgctgactcctcagcaaaactgcaaactcctacaggacagtggatcctccaaagaaggtatacgatgaggcatccagggaccctagcagtgtcaggcccctcaaatcccactctgttgagacctccccccgacccagagcaatgacagcatctttatcatctctgcatcccccagggccatcagcaggagggaaaggttcccttctgcttaattgtcagacaagcagttgagttaagaaatctgtgattattgtattgttgactatacacagcacattttagggctctatcaaaataaatctgtccctttaaaaaaagttaactaaagccgggcacggtggctcatgcctgtaatcccaacactttgggaggctgaggcaggcggatccttgagctcaggagttagagacctggactgggcaaaatggtgaggaccccatctctataaaaaatacaaaaattagcaaggtgtggtaatgtgcaccagtggtcccagctactagagaggccaaggtgggaggatcatctgggcccgggggatgaggctgcagtgagccatgatcgtgccactgcactctagcctgggtaacaaagcgagaccctgtctctaaatacatcaatcaaataaaaattttaaaaagttaacttcctcatttactggcctgttgaccctctcccatcaaaaaaagaaggggaggaagtgaggagggaaaggagaaggagaaagaggagaagaggaactgaagcaggaatttcatatctgtggtccgagaagactggtttttaaaaaacccaaagaagctgactaagggtatttgaggtaggtcctgtgattcttatcagagaagtgagtaccaggcattaatggcatggactttgtttaagaacatatgaataggcggtgggaggccaaggggtaaagcaattagtgtatgagccacacttttgtcttttgctctatattactaacaatattaatggttgataacagtgggttaattactttagctactgaaggtctatattttccatgtatcaaagatggcatttttgagggatttcttagttgtctgttctccagtgcaggctgggggcataactatgtttccaaagacacaggaatgaaccacatctgggggcagtgagtggccggcccccagttcttacccagtgcctctgggacaagctgtccctgagcccacacactttacctgtgaacatgagaggcgtgatagtggcaaaggcaaagaccaccatccccaggatgttgaaggccaggccgatctcagctacccaggcatcggccaggcagtactgcaggagcttcagggccagcaggctggtgaggtaggggagatgctgagctgcagaaccatagccgattagtttggagtcccagcagaggggtgtgcttagttcataaagggttaagatgtcctgggccccaaagtgcacagtgatcaccacgaagatggccagtgagtagagggctaaatgtttcctggacttctctggggcgggagccacatagagctggacaatggatcggtggtgacggaacgtgaagagccgggtggactttggctcctttaaggtctcaccaaagcagaaagctgcatagagagtcatggctatcagcaaggccaaggccagccagaaggggttggcataaccctgggcccggagccagtggcccccgaggaggcttgccagcatcccagccaccccgatgctggcttccagcagggccatccggaaggtgcggctgcgactggagctgacatctgccacggacgcaaagctagcagccagaaggccaccgaagtcgccgaggagggcacaaaggatgcgacccagcacgaagtagccgacgtggagctgcagctgcaccacaaaaacggacactagggcctggagcagcaggcccagcgaggccagcactagcagcgggcggcggcccacactgtcgctccaagctcccagcagggtggacgagaagagccccaccaggaagccgcccacgttcatgtagagggtccagtgggaggtaagggtctccacttcctgtaggggcacaatgaccagggtgcggttcctcactctgggttccacaatccccaaatcctcgccatcccgggagctacagggatgaggacttcctttggagccctaaacctcagagaatcttagcacagctttcaaaatctgccagtggagagggggaaggacatggaccaaggccccattccctttcctttccccccccttttgttaacctgcaaggccagactttagctcagcttttcgcatcccacccgctgaggttctcggtcaggcccctttgctctggtcccgcccaccatccaaaatgcaccctccctccagttacccgccactaccattacgcaggccccgcccctccgctgcccccacgctccagaccagggccctccacctgccaggctcctcgccgccccgctacctgcatggtggggtccgcgctgcggttgctgcagccccccctttggcgggtgccattgtagccgaggtcggcgctgaagcggtgccacagatactgcgtggtgagcgggccctgcaggaccaaggcaaagttggccaggaagaccagcggctctaccgggccccggcacagcacggcagccgcagggcgggcgcggggcttttccggggggctcgcgctcccctccatgtgcgtgcgcggcggagctgtcgccaggcgggcggcggggcgcgcgagcgactcgctgcctgggaccagcgacgcgtggcgtggggcttgcgctgtctgcgcctgcgcccggcgtccctccttaaatgtccggcggggaggggcctgtgacctgaggccaccggactctcgccgcgggtgcacctggctgggcgtgggccagcgaggggcccggcacccccagcccgcgggatgacctcacctgtaaagtgtgcgtagacaccgccctgcagccctccctcccggcccagacacaccacagataacaagaatatcaacaattaacatgtattgaccacttactatgtgctgggcacggtattaaaccctttttgtgcgttggtctcccgataactctacaggctagccaatattaaccatcgctatctaccgctgaggaaacgaggtcatcgggtactcaaggcagagctggaagagcacatgactcctgatgctgctgatgttctgcgctgtaacagagaggcagctggagaggatcggagtgggctgagcccagctgcctgggttggagcacctaggctctgccactaccttcggcatgccacttaccaccctgagcctctgttttttcatctgtaaaatggagttgctaacaaaacatgtctcaaaaagttgtggaaaagcagtgtctggtatattcaaagtgctattattgctattaacaggctgtcacgtctgggagtggtggctcacacctgtaatcccagcacttttggaggctgaggcgcatggatcgcttgaacccaggagttcgagaccaatctgggcaacatggtaaaaccctgtctctacaaaaaatacacaaaaattagccaggcgtagtagcagatacctgtagtcccaggtactcgggtggctgaggtgggaggatcaattgagcccaggaggcagaggttgcagtgggctgagatcgcaccactgcactccagcctgggtgacagagcaagaccctgtctcaaaaaatataaaataaaaataaaataaaaaacaagctgtcacttgctccactcctgccctaggatcttttcctgggaaactagtcttgtttctggggtcaggcagggcctggctctgcagttcccttagagaagatgggggagggcctgggaggtccttgggtgtgaacctatgctcctgggtggctcccattataggaattaggccagaaggcagtcacctgctctgctgctgaggaggtcagaccctgtctgggcctctgttttattgcctgtaaaaaggaacagcattaccttccttactcccctatctttcattcattcagctcatttactgagtgccccttacgtgccaggcactgtgctgggggactccgggaccacaacaggaaaggaaatagacaaagccctcaccaggcccgttagtttctagaatggtgggagaggaaaaatagtcaaagaatcctactaattgatacaaaattccaaccgtggaaaatagttttgaactccaagggtgctaattcaggggctggaggtagggggagcagaatcaggaaaggccaccttccctgagaacagagcagctgagtgggtttctggaggcaggtcctgacaggcctgattcttgggaggatggatggctccaattctggccactgtgactgtgcctgggcctgttggagcttgttagctaccccacctcccctgagccaggagtccgagactcaggatgggtaggtgctggctagatactagtgaactgaataacctccccctgcaagctgcccccacctgtggtcccctagagagaggaaattccacattaaacattcaagcctctggattggctccactctcctccctccccttccaactcctccctaccacttacacaaaagcttggcccagttaggtcagctgcagtgagggaggggtacttggctaaatccttggaattatttcttagataaagaactaaggctaggagaggccaaggtccctcatcaggaatgggacagggtgtggctcatcccagagccagagcctgcagtacccactagggtagaggtcttttctaactccttgaaaacagctgcaatcaggtcactggcctgctcaaaaccatcctgggctttccatttcgctcagtgagagccaagtccttatgagagccctaaggccacctacctcttctctgtccctctcccctgctttgtccccctcaatccttgtgctcaagccatgctggcctcctgctttagggcctttacacttgcggtaactactacctagaatgctcttctggatatctgcctggccggctccctcacttccttcaagtctccactaaaatgtcacctgaccctcctatataagcaacttccctccttccttgcttcctggcactccctaatcctttaccctgtttcatttttttccatagtgtttatcaccatctgaattataactttctggtttctttgttgtccatctccctttactagaggtcatgatggcagggactttgttttttcatcactaccatatccccagcatctagaatagtgcctggcgtgtggtagatgctcaaaagacgatcgctgaatgaactctcagtctcaaggagaggagattccgcagctggagtcccagagcatgtggagagggttgccaatgttgagctgcactgtggagtccagagcccaagaatctccacctagaaggaagctgagaaatcacatctccacccatccaaccatttaaaagacagggaaactgaggtccagagggaaaggtgacttacccagagagagctaaaaagtcctgcctgtcaaatttctacaggaaaggagaagctattgcaaaggaaaagatctgtagacttatttccatcagaacataaagccttaattcaaaggcaaatgacaaacaaagtcatttgtttgtcattaaaagaaagaaaaatctttcttttaaaatatggccgggcgcagtgactcatgcctgtaatcccagtactttgggaggccgaggcgggtggatcacctgaggtcaggagttcaagaccagcctcaacatggagaaaccccatctctactaaaaatacaaaattagccgggcgtggtggtacatgcctgtaatcccagctactcgggaggctaaggcaggagaattgcttgaacccgggaggtggaggttacggtgagccgagatcatgccattgcactccagcttgggcaacaagagcgaaactccatctcaaaaaaataaaataaaataaaataaaatatgacaaagggttactattttaactatatgtgataataacctgaagatccctccctcagtaaacagataaaaaccaagcactgagaggttgtaacacagaacatgcatgtgagacacacaaatgagctcttctccagcttctgaatagtgagaaaaacactgtgcctttgatcttgttctttgcagccaacacattagcaatgattttgtttaaaatgagaatgctcaaagctggtaaggctacagtgaaacaaatactgctgaaggagtgtaaatacaccctttcaggaaaaaatttggtagcctttaatcaagacccttgaagcctctaattctacatgtaggtctctatctaaaggaaatagtctcaagtacagaaaaaagccttatgtgctaagatattctcccataacattatattgacaagagtaaaaaaaaaaaaaaaaagataaacaacctatgtgtccaacagtagcgaaatggctgagtaaattatagtctatccactccatgaatatgagtcattaaaatgatatgttcaaagagattataataatatggaaaactgcttacataataatttgtatgtagaaaaaacagagagcttgtttatgtggtatggtcataggcatagaaaagaattgcactgagtaaagactggaaaccatggcaccaatatattaacagaagtcctctctgcgtggtagtagggttaggtaagattctcttttcttctatttaaaatgttttcaacccttctgatataaacagatataaacatatgttttaatcatggaaaacataaacattttaaaaatctgatgatactcctctccttcaaatgtattctggctcaattgccaaatatcagcttcatgctccttgatgttctggagacatcactaggagctgacttttattgaagcaggcagcaccatactgagggcattacatacattatcttactgaatcctgactacagccttatgagataggtattacaatttttttttctttgagatggagtttcactcttgttgcccagtctggagtgcaatggcgtgatctcggctcactgcaatctctgcctcccaggttcaagcgattctcctgccttggcttcccaagtagctgggattacaggcatgtgccgggacacctggctaattttgtatttttagtagagacagggtttcaccatgttggtcacgctggtgtcaaactgctgacctcaagtgatccgcccacctcggcctcccaaagtgctgggattacaggtgtgagctaccgcgcccggccaggtattattatttttacagatgatgtaactacagcatagagggatgaagggaaatggtttttctcactctgggtacaggttttcttttccttacacctacctgttctagtgctttctgttattctaagccttagtatatgttagtctctttgccagtaatacccttcctactttgcttggcctattcagctccttttcatccttcaaaacccacctctgtgtctcacttctaggcggaattagtcattggctaatatgtacttccacaatactgggttcatacatttaaccctggttttaaacttaacctggttataaatatgtgttcccaggtttgtctcctcttaacccctacctatgtcctgcctccagatttgagggcagagaaaatttttttcacctctgtattccctatccctgggcttgacatgcaataagataaaatgttaaataactttgatgacatgcatcaactccagtcaattgattgaatctgtctggattgctacattgagatgggctatttttccagctttgtgggaaggagtcctgcgattcattcttgatgtctgccatgggcttgggaatggtaagtactggcactaaaaactgtgttgtccaaccccaggatatgtactcagtaaattttgagaggctttggggaagtgcctggaagtcataagggtttctctttgcttccagttggataatgcctacgagaggctgtctatacaaccactgtgacagagaagattgcaacagggattcttcatccaaacagcagtcttatcacagcctccacccaaaacctatgcctcctttttgcaagaggccacttacagcttccaaagagctcttcatgattttagacactgagaggaaggaaggagacagcatgagagaaaagctattttcctttttgagatgttgcttctcacatagcaaccctaaaagtcaaagcagcatccttgtcacaactaagggtgttcccagcactgagtagaagctgcaactatgcccccatcgctgtgagactttgaccaagtccctttctggcttcaattttctcatcaatgaaataatttctgggcctctatttccttgtctgtgaaaaatgaagtaataatatctacctatggggtggatgtttgggtcaaatgagaaaatatgtatggctgtgaactttatgtggctgtgtccaggtgccagagatgatgattgctgttgaactgggcttgaaggtaggagggatttcaccagaaagaagtgaggctgtcccaagtgagaggaaaagttgggccttacagagggatgctacccagaattcagagaagtacagggctagaggtgcattaagtgcataaagatgtcattaccgcatgggggagatttcacaaaacactttctgtctttggcctcctgcccttggtttcattttaaacactttccttttgctagagcctttgcatctatccatctattcatttagcatctaccgcctgccaggcccactgctaggtgctgaggttacagacaagaatttacataattccttccttctatgagtcctcaggctagtgggaagcagcacaacaaatctcaaataacaataacaaaagcatgccgtaggatgaataatttcagagagaaggtgtgtgtgtgtcatcaagagaaagtcaaaggattcacagaggagctgaattttgaagcatgagatggtaaaaaggagtctccaggacaacagagagaagacatgataaagggctttctgtacagtgggaaaggcaagttctgagagacagcaaggacacctattttgttgggggtactgaagtcatcataggacaccctgaaggaaaatgagccaaggcctcatgttcacaaagcgtttcaattttagacattcagtcccagagactcactccctaaattggtcttttagttggagtgtttagtccagttacatttaatgtaattactgatgtagttgtggttaagtctaccatcttgctaaatctttcctttaatttaaaaatcttttttttgagatagtgtctcactatgtttcccagggtggtcttgacctcctggcctcaaggaatcatcccacctcagcctctcaaagtgctaggattataggcatgagccacaacacccagccttgccaaatcttttcttcttttcctacctgttttgtttctttacttctcctctcttatcttttgggtgaattatattatttcatttctgccttcttcccttatgtcaaggattataaccccttaagtcctgcctgtattaactccccaccaatgctttcaaagaaagaagagcatactttacacagttttggccggaggtggtggttcacacctgtaattccagcaatttgggaggcggaggcaggcagatcacttgaggccaggagtttgagaccagcctggccaatatggtgaaacattgtctgtactaaaaatacaaaaattaaccaggcttggtggcacgtgcctgtagacccagctatttgggaggctgaggcaggagaattgcttgaacccaggaggcagacattgcagtgagccgagatcatgccactgcactccaatctgggcaacagagagagactctgtctcaaaaaaaaaaagtcacacagttttaactggtgtcccaatttctatagttctctatgaatatatttactcatggggacccatggggcaagaaaatatatgtgtgtatgtataaatatatatgtatatattaattctgtaattatgctgtgactaatacagctaagtagcattatattgtgtgttacaacgtgttaatttattaaacataaatatttaaaatatgctatgaaagcctgtcttggcaagtctttatttttagtttctctggattctcaaataagaaaaatggcccaggtctcttgatctctgggagaccctgcaggagcgcctcctggctgacacagtttgggggtgacatagagggtaatgtctagggattccatttggtctcaggaaggatatcttctggtcaggccctccctccagtcccaggctcagaagcccagctgtgaagccctggagcacctgacttttttttagtgcaccagagaactaaactcaagcaagacgggggtgcaaatcagaaggctcttttctaacacggggtttctattcgtaggctgtaatggccacatcacttatctagggctgcctattcccagtgccagggaaatagaagatggaagcagggatcgggaaggtgctaggtgagccgcaaatcagagccaagggacggaggatgatttgcagtagggagagcaggcacaaggaaagccaccgctgagaactgccctctagggactgaagtgttgtggcacttccttggtggtgttcctgtaccatactttcctatgctgaccatgtacatacattctttttgtaggtctgtcaatagtgctgatcagtaatagttagtttttagttagagaactgctgtgtgccagccactttacatatatgatctcttatcctcattataattcagtgaggtaagtattgtgatccctgctttatagatgaggaattaggttatgtggcttgcccaaagacacacagctaaagggtaacagagctgatattcagcccatgtctgtctgactccaaagcctccacactttgtactctcaatagttcacagacatgtgacccaggggttggatatggcccacagatgtgttttgtttgattcacacttgttttcaaaaaaataatcggctcacatcgtgtattttaaattttgaattagttgccaacatctaacaattggaagattcatatgaaaaatccaggtttttgcattcccttgaaaattcagaaatgatggcaacattcacatcaggcaataccttgctgaagttgggaagggactgtcccctccctttagctgtgggatatgttctccacttcaccactcccccactacccacctccactcatagaggatgcctggtcctataggttttcgagcttgcagcccctttcctgtgctgtgctgctgcctgggaagaggatcccaggtttcttaaagggcgtggaccaaggctttctgaacataaagcgatggaatcactgtgacacaacaccaagctactattccaagcatctgaaaagcattctgttttctcccattttaggccgatttaattagcgataaggaacaccttagtggccagcccactacaatctggtactgctatactttatagccatgcggagacagtgtgaggctgaagaagtcaagaagtcggcaggggccaggtgatgcctctaaggaattcagtttgttgggtgttttttgtttttgttttggttttgtttttgtttttgttttgagatggagtctctctctttcgcccaggctggagtgcagtggtgtgatctcagctcactgcaacgtctgcctcccagattcaagcgattttcctgcctcagcctcccaagtagctgggactatgggcgcacaccaccacacccagctaatttttgtatttttagtaaaggcagggtttcaccatgttggccaggctggtctcgaactcctgacctcaagtgatccacccgccttggcctcccaaagtgccaggattacaggtgtgagccaccgcgcctcaccttcaggagttcaatttggatcttactgagattgaggtgcctgtgtgatgtcctggtggagggggctccaaagggcagctctacccagagctaacaaggatgggcagcgctaggagccatcggcatatgtgtgatagagcctgggagtagcagaccaccctgagaggatatgacaagggacagagagcctaggcaggggtcagtaaggagcacaaccgtttcgggatgaagggaggaagatggagcaggcagagaggaagaagagaagcagcagaagggagcattaaaccaaaaggagagaattgcagatgagagtggtgacatgccaggtactacagaaagaggtctagggaaacgttggcaattgaaactcaacagtggtcaccccagaagtttcagcaggtgagatctttttttaaaaaaaggaaaaaaatagaagtcagatcacaatgggttaagtcaggatcaattgtacatttaatactgaggaatgaagcaaaggtgcctcttgataaggtaatccttagagactccaacaagcaagatgcaacacattctgggatgagagtagctcttctctcaaaggtggaactggggtgcactagggacaggcaggcctaatctttatggccagtgcaatctcagggaagcatatctgaggctgaaacccagtcaggggtagtgagaaggcaaaaggtgcaaccccgcccaggcctagctggttaggtggatgacagcagcagacgcactccccaggtgttaacctgtccaggtagccagctaccctccatgggcccagaattgattttttcatgtttaactccgatgctcctaagccccctgtggtaggctaaactggcacagcctcacagccctgcctcacttgaggctgtcctgtggtgccttctccgttttagcttttctttttgtcttttttttttttccccgagacggagtcttgctctgtcacccaggctggagtgcaatagcatgatctcagctcactgcaacctccacctcctgggttcaagcgattctcctgcctcagcctcccgagtagccgggattacaggcgcttaccaccacgcccagctaattttttgtatttttagtagagacagggtttcaccatgttggccaggctggtctcaaactcctgaccttgtgatccgcccgcctcagcctcccaaagtgctgggattacaggcatgagccaccacacccggctcactttagctttttttacgcagttattttgacatttggctgacatttgcccttatttcatgagagtgagtggaaaaacggagaacactggggccgactctagtgctgatatctttcaggtaaggataggaagtcaattatgtttgcagctgcagccatgccactgttgctctctaaccctgagcttcctctagctcgccgagctacagcccaaggagaaggataaaggaggactctatacaaggagaagcgagtgagtaaggaggtctctataccatggctgatacaaagccaattgcctgaaattgacctgtggtaaagcacccagggagctactgactacaaaagccgcttgcaagagtgcgccctctactgcagagatgaagaaaccctatccttacaggcttgccactgtggcactccgggaacgtagacatgctcagaagtccaccaaacctctgattgcaaacttcccttccaatgtctggtgtgaaaagttgctcagaactttaaaacagatctgtgttggccgggcacggtgggctcacgtgcccagaggcacatgcaccattacaggtggctggtgcctgtaatcccagcagtttgggtggatcacttgaggccaggagtttgagaccagcctggccaacatggtgaaagcacgtcacaacaaacaaacaaacaaaaaacagatctgtgcttccagagcgcagctattggtgttttgcaggagggaagtgaggcctgtctgtttggccttttgaagacaccgagttgtgtgcaacccatgccaaacgtgtaacaactatgccaaaagacatccagctaacacactgcctacgtagagaacgtgcttaagaattaactatgatgggaaacacttcattcccaaaatatttttctcttcttcctattactggtaattctgaatgtcaggttttttttcccatagggtcttaagtatatgattgagagtagaaaaataagggagagaaatcaattggccgttttcccattttcatctgtgtatgagtttttagtataaatgcagggaggtaaagcatcaatgcaagtcagaatgtttcagtgaacaagttttagcagtacaactttataataattataaataaacctgttggccaggcacagtgactcatgcctataatcttaactctttgggaggccgggatgggaggatagcttgagcccaggagttcgagagcagcctgggcaacatggtgaaactctgtctctacaaaaattacaaaattagctgggcatggtggtttatgcctgtagtcccagctactcgggaggccaaggcaagagaattgcttgagcccacgaggtggaggttgcagtgagccaagatcacaccactgcactccagcctgggcaacagagtgagattccatctcaaaaataaaaataaataataaaaataaattaaaactaattaattaaatacgaagaaatgggaatgtgaaatctctaacatggtgaattaaggattttttgaaagtccacctcaggactactggtgtgaactagaacacagatgaacaccaacataggattcttctaggagccctaattctcgaccttgtttgcagtggtagtttgctgctgccagtgtctggtcttcctttccaagccttgtaccttgtccctctccctccagagtatttttttgttttttgtttttttcccaggctggagtacagtggtgcaatctcagctcactgcaagctccgcctcccaggttcatgccattctcctgcctcagcctccccagtagctgggactacaggcacccaccatcacgcccagctaatttttttgtatttttagtagagatggggtttcaccatgttagccaggatggtctcgatctcctgacctcgtgatccacccccccttggcctcccgaagtgctgggattacaggcgtgagccacagcgcctggcccagagtctcttttttttggagacggagtctggctctgtcgcccaggctggagtacggtggctcgatctctgctcactgcaacctccacctcccaggttcaagtgattctcctgcctcagcctcccaagtagctgggattacaggtgcccgtcaccacgcccggctaatttttgtacttttagtagagacggggtttcaccatattggttaggctggtctcaaactcctgaccttgtgatctgcccgcctcagcctccctaagtgctgggattacaagcgtgagccactgctcccagtcccagagtctcttacagtgctttttttttccttttttcttttcttttttttctttctttcttttttttttttgagacggagccttgctctgtcacccaggcttgagtacagtggtgccaccttggctcactgcaacctccgccttccaggttcaaacaattctcctgcctcagcctcccaagtagctgggattacaggcgcctgccaccacacccagctaatttttgtatttttaggagagacagggtttcaccatgttggccaggctagtctcgaactcctgacctcaagtgatccgcctgcctcggcctcccaaagtgctggaattacaggcatgagtcactgcgcctggcctcttacagtgtctttatggcctaatgaagtataaacgtgtggattgtgcatcctcagagagaggaagatggacctctcataaaagcacattatggccaggtgcagtggctcacacctgtagtcccagctaattgggaggccaaggtggaaggatcacttgaggccaagagttcaagaccagcccgggcaacacagcaagacctcatctttaacttaagaaaaagttagccgagcatagtggtttgtgcctgtagtcccagctactcaggaggctgagatgagaggaccacttgagcctggggaagtgaagtcgaggccacagtgagccatgatcacaccactgcgctccagcccgagtgacagagagaccctgtttccaaaaaaaaaaaaaaaaaagcgaggagcgcctctgcccggccagccaccacatagtctgggaagtgaggagcgcctctccccggcggcccaacagcttgggaagtgaggagtgcctctgcctggccaccccaccatctgggaagtgaggagcgcctctgcgtgcaaccctccaagtgtgaagtggcagccttgtgtgtggtctttctgccctccccaagtttgcattttcgacattaaagtttacttttaaattaaaaaaaaagttcactatgtcagacgctctaaaaatgaacaacagtgaacaaatactctgtcctcgtttttctttttgaatgtgtgtatctgaatctccattcaaatatatactttacctgtttgctattatagacttgaatcactctccagatgtgtaagaatgttagttgtgagtgcaaggatcactcacaatctgccctggggatcctacaggttatgtggcgagagcgggctgatccctatgaaataaagagaaccgtaaaaacggatgtgagcagttatccagcttctggatagtggaatatcctctcacttttccctgtatacatattttaggaaactgcaagtcatattacaaaaaagaattaacaacaaagaaatataagtgacccaaatgcagcaagaataatagcagtagctaatggttaatgagtatttatggagtaaacattgaaatatctcaacttatccttataaaaccttacattccctatttatagaggggatacagaggcttacagagattgagggacttatcaagggtactgtggctaattaagagtcaaagacaggactggaaccccagtcagtctgcatggaaagccagacttctcgctcctgccctctgctgcctcccaggcgcggagagctgttggacagccagcccattaccgaatcctttctcaagcaaagaaagctgcgttcactttcctcttgaaaattttcaagtcactaaaactcatcaacacccacatcacaatctcctactcatcaattgtctacaaaattcctgctgaaaaatcagcatcagggtctgagcgcagtggctcacacctgtaatcccagggttttgggaggccgaggtgggaggatcccttgagcccaagagtccaaggctgcaatgatcatgccactgcactgtagcctgggtgacagagtgagaccctgtctctaaaaaaatgtttttaaatcaacatcagcaagtccttgttcccaacctgaaaataaatttcttctgtctcctaagatgagaaaatgagaattgagtgataagaaactgccctagaaacttaaacttttattgttgctactgtttactccatctttaacttttatttatttgttttgttttgttttgttttgttttgagagagtctcactctgttgcctaggctgaagtgcagtggcacgatctcggctcactgcaacctccgcctcctgagttcaagcagttctcctgccttagcctccccagtagctgggactacaggtgcatgccaccacgcctggctaatttcttttaatatttttagtagagacggggtttcaccatgttggccaggccgatctcaaactcctgacctcaagtgattcacccgcctcagcctcccaaagtgctgggattacagatgtgaaccaccaagcctggcctaacttttatgattattaaaaattttaggccaggctcaatggttcaaatctgtaatcccagcactttgggaggctgaggtgggcagatctcttgagccctggagttcgagaccagcctgggcaacatggtgaaaccttgtctctacaaaaaaatacaaaaaaattatctgggtgtagtggcgcacacctgtagtcccagctacttgggaggctgatgtgggagcattgtttgaacccaagagttctaggttgcagtgagccgtgattgtgccactgcactccagcctgagcaacagatctagactctgcctcaaaaaaagaaaaaaaaaattctagcatacgcaaaatagagtcatgcaatgagccgtcatatatcatcacttatgttcaacagttattatcaaaatattgctacagattaatctatttttccctttgctcaagtattttaagacatgccaaatgtcatggtgtagtgtcatttcactgctacatactttagcatgcatctctaaaatattaatatatagacattttcttccataaacacagtgctgttaccacaccttaaaatttaacaattctttgacacgatctgatactgggtactcaataactgtttcaacaaaacatctttttatgactggtgtgtttgaattagacttcaaacaagcccacgtgttgcattctaagagcactttaaggctcttcaatctcgctctctctctttttttttttttctttttgagatggagttttgctccattgcccaggctggagtgaagtggcatgatctcagctcactgcaacctctgcctcccgggttcaagtgattctcttgccacagcctcccgagtagctgggattataggtgtgtgccactatgcccagctaatttttgtattttttttaatttaatttaattttttttcctagacggaatctcactctgttgcccaggctggagtgcagtggcggatcttggttcctacaacctctgcctcctggattcaagcaattctcctgcctcaacctcctgagtagctgggattataggtgtgtgccaccatgcccagctgatttttttgtattttcagtagagacagggttttgctgtgttggcctggctggtctcggactcctggcctcactcaagtgacccgcctgcctcggcctcccaaagtgctgggattacaggcataagctactgcacctggcccctgtttgctttttaaaataacattggcttgttatagaaataatctgaagatttactaaaaaatcatgtgcacactgaataatactcagtgtaaaaattactcatgaaatttatattataaatagggattttatagcattttttgagctctaagagtggattccatcatatgatatgtaaatctattgctcaacttttatatccttgacttccacagtatataaaaataaaagcactgcccatagtagaaaaatgtatccaccagagtggcccgaaataggaggcatctgggaaatggagatcaaagggaaagaaagaacttggtagttcatccattccagggtaaattacctggaatggaatttaccattctgggtgatttgcatgcagtcaggcaggcacaagctttcacttctacaggcacctcggattcaacagcagacaagacagtcccttgtgagcaagttgctcaaagttttcataaatatccttacagattccccggccacccacctgcacatcttcatctttcttctcctttggtgacctctgatgaccttctggcctccagggcgcttgatggactggcacatgcatgcaggtccctgggaagatctattcaggctttttaaagtttgattcccactgagagttaacacgttggtgtttggacctgtcaggcagtcccttatgagtttgattactgtgtctcagcctctgaaaaccaaacacagtctagctgtcctgacaaagtagcatttgggagcctagacctgggtgtccaaggttctgctgccatagacagaatggcttttttacaagactagtcactccctccaccctccaaactccaccaaaacatcttatcctggtgaatgaggccttctgtgacctcttctctgcctcccctcacccttattccaccacctcagtagctttttcattgtcctcatccctgtccccactgtcacttcaccatcccagaccctccttggactattccaactaacccctaacttgtctcatatattctactctattttatttttttaacagagtcttgctctgttgcccaggcgtgcactggcaggatcttgatgtgcccaggcgtgcactgacgtgatatgcaatggcatgatcttggctccctgcaacctttgcctcccaggtttaagtgattctcatgcctcagcctcctgagtagctgggattacaggcatgtgccaccacgcccagctaattttttgtatttttggtagagatggggtttcaccatgttggccaggctggtctcaaactcctgacctcaagtgatccacccacacgggcctcccaaaatgctgagattacagacatgagccactgtgcctggtcttgtctcatatattccagacttgctctgcttccaaatctttctccatggtaatctattaaaatgcatctcgttttcttactccgctacttaaaaaccttcgatcgttcccttggcatgatatctgaggccctttccggtctggtgccagctccctcacactttgcccccactccatgccagacactatgcccactgcccatctagtccaagggcctgctactgcccccgcctagaaggccccatgcccacgccacctgcctgtttgctggaaaaactctttcctgctcaaccttctagactcgcctttggatacctcctgctcccagaagcccattccccgtccagaacaggcagtgacacagagccctgtacttcccccatcggagtactagactgttacttctccgaggagaatatgtcttgcctcatctagcagtgcctgtcatgctatgattaatagctggataactgaaaaagtgatattttaggcagcatcaggctgggcacagtggctcatgcctgtaatcccagcactttgggaggctgaggcaggaggaccacttgaggtcaggagttcaagacaagcctggccaacatggtgaaaccccatctctattacaaatacaaaagttatccaggcatggtagtgcacacctgtaatcccagctactcaggatgctgaggcaggaggatggcttgagcccagaaagtagaggccgtagtgagctgagatctcgccactgcacttgagcctgggtgataaagcgaaaagctgtcttaaaaaaaagaaaaagaaaaagaaaaaaagaccgcatggcttctctgctccaggctgaacaactctgctccctcaaccacccttcctttgatggaattcccagatttctctccaacatgggctttcttgcagacgtagcatgagcttcacctgactcgttcaggttctgtgtcccaattaatgaaggcttaactggggagaagagggcactctcactgccttggtggctcctgcatgcagtatcattcccgggaccctccagctctctcctcgctctgctcctgcattcacttcacaacgtggcccaagtgcaggtggttttggacccattttctggcctatgcatttattccttagatgtcatgtcaccatcttagatttagcccatttgtaacatttaatgttctctacttgcaaggggaatagcaacaaattctggctgtgtgtggtttttttgttttttttttttgttttttttttgtttttttttttttttttgaggaatttctttgaatggtagctctcagaatacgaagaatgttgaacaaccaggacacaagtaggacaggaaagaggatcattctgggaatccaggtagcaggaaccacccaacacactttacaggatgctgctatcacgaggcatgcgctctaactctgttccatcactcgacccaagatggcagttctgggaactagagaggctggccggccggcctgcgttgcatgcctgccccttggcaaggagggaagcatcttgacgacagttcctgcaaggctgcagccagtggggcaggcagagcgagatgctgctatcgaaaggtgaacagattgttatcaggggaaaacgttgctatccatgctgatatctttatgtcatacctcgagcaaattctgaagatgaaggaagccgggatggggaagatttagtgcattgtgcagggtaagtgtggtcaggctctggcagagtctgttcgtggcttgcttctgagcagcagagccctgcggcaggtaatcctgaaggcagctgtgcagccagagtgtggctgtattatatattatacggcatataatacatagaacatcctgtctggcagggcatcctcggtggctcagtacagccaccagacgagtgagccaccatgcctgttgctgtcttaaaatatgactttttcagtcatccagctattattcatagcatgacaggcactgctagatgaggcaagacatattctcctcagagaagcaacagtctagtactccgatgggggaagtacagggctctgtgtcagtgcctgctccagacagggaatgggcttccgggagcaggaggtatccaaggtgagtctagaaggttgagtaggaaagagtttctccagcaaacaggcaggtggtgtaggcatagggccttccaggccggggcagtagcaggccggggctacatggggagtgggcatagtgttcagagccgacctcacctggggacaggctaggacttatggagtatatgtgggttcagtgctcaccaccccacagataatgccagggaccaggcttcggcagcaagacgaattccaatgtccacagctcgggaggcttccccgctttttgctaactgggagcctcagctgcctcccttttccttctctccttgggtcctcatggacttcctccagacctggcccaggctgcttgtttccctcctggtggccacgcctggtaccacagtgctctccaacacagggaaaaagtccccaaccggcagatagggacccagctgtatacatctggaaagtgagccagtattaagcaggcatatttcccaaagacttgtcatggcacagatttggtttttggtgggttgacttatataatgacgagtcctgtaaactcgagtcctgtgaatgagcagttacatctagcaagccacgttccaagtcacctatgtagaagtacaggcaccaggactgccctaggatgttgcaaggatcagactgtgctggtggtgtcccttcaagggaccagaccctcagccctgtggggctttacgctgggacaaaaggtacacactattaaagtgttagcctgtcaacatttcacatgccctcccaccaggaacttccttcccagcacacacccctttgctggggtttctctgatcactcaagacctctcactctctccagacttgactgccagcacttcttccctagacccccatcagccagccagccaccacctgccatgcttaacccccatgtattgggtatccccagaagtcaggctgtaccttattccccaggaaaacaaaacaaaacaaaaaaaaaaaacaaaaaaacaaaaaaaaaaaaacaagaagaaggctggttgcagtggctcatcccggcactttttaaaaaattacctgggccgggcacggtggctcatacctgtaatcccagcatgttgggaggccaaggtgggtggattacctgaggtcaggagtttgagaccagcctggccaacatggtgaaaccccgtctctactaaaactacaaaaattagccaggtgtggtggcatgcatctgtaattccagctactcaggaggctgagacaggagcatcgcttgaacctgggtcacagagtttgcactgagccaagatggcgccactgcactccatcgtggggagccgagtgagactctgtcaaaaaaaaaaaagaaagaaagagaaggaagggagggagggagggaagaaaggaaggaaaaaatacatgagaactgcaggagattactttttactgcaatatgcaatttactgaagacacgaactgctcacatggagacggttagcaccatatggtattgtaagcagatactcacacgcttgagctcatcacaatagcaacaggaggtggaaataattacagtggtatagtctgtgctacagttaattttatgcagttatgatttaatactgcatccttacatttgtttacatttctcttgaccgcaaatggcaatggcactgtgtattatctgtgtgtacatatttcgataaatgttaacttttgaaatagatttgtgtatatttcatcaaaatatttatagagaacaatctgcatacaagagaacccatacagttaaaattgtgctgttcacaaccgagttaggtggctcacgcctgtaatcccagcactttgggaggccgaggcgggcagatcacttgaggtctggaatttgagaccagcctgaccaacatggagaaaccctgcctcttctaaaaatacaaaattagccaggcgtggtggcacatgccggtaatcccagctacttgggaggctgaggtagaagaattgcttgaacccaggaggcagaggttatggtgagccgagatcacgccattgcactccagcctgggcaacaagagcaaaacttcatctcaaaaaaaaaaaaaaaattgtgctgttcaagggtcaatttatagagacacacaattgatttttttgtgtttatcttatatcctcagtgttgccgaagaaattacattgtttggttttgaaatattgaaataaccttgcatgcctacagttaacctctcttagtcactgtgtataattattttgtatattgctgaattctattgctatttaacattttaaaaataggctgggcatggtagctcatgcctgtaatcccagcactttgggaggctgaggtgggaggatttcctgagcccaggagttcaaggccagcctgggcaacatggcaatacccaatctctttaaaaaaatttttttaaatacatttgtttttgttagagatgggggtcttgatctgtccacccaggttggagtgcgatggtgctctgatagtttagtgtagtctcaaactcctgggctcaagcaatcctcctgcctcagcattctgagtagctgggaccacaggtgtgtgccatcatgcttagctaatttttaaatttttttttttgtagagacagtatcttgccatgttgcccaggctggtcttgaactcttggcctcatgtgattctcctgcctcagcctcccaaagtgctggggttacaggtatgagccactgcacctgacccaaatcttgaaaacatgtatttaaggccgggtgtggtggctgacacctgtaatcccagcactttgggaggctgaggcgggcagatcacctgaggtcaggagttcgagaccagcctagacaacatggtgaaaccccatctctactaaaaatacaaaaattagccgggcatggtggcaagtgcctgtaatctcagctactcgggaggctgaggcaggagaatcacttgaacccgggaggcagaggttgcagtgagccgagatggcaccactgcactccagcctgggtgacagagcaagactctgtctcaaaaaaaaaaaaaaaaaaaccatgtatttagaactctacctagagataaagaatattgcaaaataaactttggtgcttcacctgacctcgttttgggaccatgttgtggacaaacaacagtctaacaaccaaaagtgtctaaagtaattctaatttttcagagatccccttcataagccataggaatgtctcttatacttcccaccctcaagatggttgtattagacagggttttccaaagaaaccgaaccaataggagatacataaatataaatataaatataagttgtgtgtgtgtgtgtgtgtgtgtgtgtgtgtgtgtgtatgtgtgtgtgtgtggagagaaagagagatttattataggaattggcccaaatgattacggaaaccatcaggtcccatgatctaccacctgcaagctggagaatcaggaaatctgagggtataattcgggttgagtatgaaggtatgagaaccaggagcactgatgtccaagaacaggagaagaggaatgtcccagctcaaatagagaaactgaattcacccttcctcagcattttgttcttttcaggccctcagtggcttggatgacgcctgcccacattggtgagggtgatcttctttacgcggtatttcaattcaaatgctaatctattctggaaacaccttcacaaacacacccagctatgtggacatcccttagcccagttaagttgatataaaaattcactgggcacagtggctcacacctataatcccagcactttgggaggccgaggtgggcagatcatgaggtcaagagatcaagaccattctggccaacatggtgaaaaccccatctctactaaaaatacaaaaattagctgggtgtggtggcacgtgcctgtagtcccagctactcaggaagctgaggcaggagaattgtttgaacccgggaggtggagtttgcagccagccaagatcgtgccactacagttcagcctggcaacagagcgagactccttctcaaaaaaaaaaaaaaaaaattaagcatcacagaggtgtttttaataagtactcctgggtcaattgaaagtccatagtccattcagaaaaaaaatattgacttctacattactcctacagagaaatcaattgtagataaattgtaaatggtacgataataaagctctttttttttttttttttttttgggacggagtcttcctctgtcacccaggctggagtgcagtggcgcaatctcggctcactgcaagctccacctcccaggttcacgccattctcctgcctcagcctcctgagtagctgggactacaggtgcccgccacaccgcccggcctttttttttttttttttttttttgagacagagtctcactctgttgcctaggccggagtgcagtggcatgatctcagctcactgtaacttccacctcctgggttcaagctattcttttgcctcagcctcctgagtagctgggactacaggcatgcaccgccacacccggctaatttttgtatttttattagagatggggtttcgccatgttggccaggctggtcttgaactcctgacctcaggtgatttgcccttctcggcctcccaaagtgctcagattacaggtgtaagccaccatgcctggcataataaagctttttagaagaaaacaggagtatgtcttaatagcctttgagtaagcaaagattatttcaacaggacacaaaaagaacttttattcttcacaagatatccttaaaagagtgaaaatgcaagccatagaataggagatatttgtagtacatttaactgacaaagaactcatattcaggatatctaaagaactaaaaatcagtatgaaaaggatagaaaacccaatttttacaaatgggcaaaggacttgaacagacacttcacaaaagaaaacatccaaatggctaaaaaacattaaacattgtacaatctcattgatcaccagaagtacaaattgaagccgcagtccaatactactacatctgaatggctaaaaaaaattttgtaaaaaacagaaaatgtcaagtattgactaagacagccaagtatctagaaacaacccaaatgtctatcacaggtagaacagacaaataaattgtgggtattcacacaatgggatatcatacagcaagaatgaaggaactacaactaggcagtgcccagcttaggtcctgtcctctcagcccaacccccggcagaaatagagccccttttcccaaatggtttccaacattagcatagtttcattacatggagattttgtatttgcaaattctcctacttgctaaaatttatgtgtgactcaaaattaatactcttgacactttctcagcattttggggtcattcagggtcatatacaatgtagtgaaaatttgagttatccaatacacattcccagctgaggtcaaacaaagcaacactttgctgtcttgtttcagctcataatgtaaatatgtccctcaaggtctatttagtgccatggtttttacatttttgtgctttttgttggtgatttcactgttttatttatttttttatatgtttttgagacaaagtctttctctgtcacccaggctggagtgcagtggcataatcacagctcactgcaaccttgaccacctggactcaagatatcctcctgcctcagcctccaaagtagttgagactacaggcacactccaccacacccagctaacatttttattttttgtagagatggggtcttgccacatcttgaactcctgggctcaagtgatcctcccaccttgacttcccaaagtgctgggattagtgctgagattacgggcatgagccaccatgcccagccctctttgagccacttgatatctaccaataactttctttctgcttaaatcaggtagaatagatgctgtggatcacaattaggaaccaagcctaacaatagaagatccaacagttgctaatggatcatatctactccacgtggaagaataggaaaacctggactctctctctctctctcaggtccttcctgtcagcatttacgcatgctaaattgatctcatcttttaaaaaattctcttagccatatactctcctccaccccattctctcctacttgtctcaaatagatagatgatagataaatttggctttgttgtgttttgcttttttataaaagtaaaccaaattcagaggacaggctaaacatcatctgtgttgactggacacagatgaagagtgaattagtgaaatgaagaactgaagatagagctgaagaaatactcagaattcagcacaaaggcaaataaaatagaggtataaaacctacaggatagaataaagtatgaagtctaacataggtctactctgaattctaggaggagcgtctagagtagaccttttaaaaaaatgtttagagacagagtgttgctatgttgcccatgcccagctctttgcagaggtattggctgagtcgtttccagaattcatgaaagacgcaaatcattcaattcataggtccatgtaggataataagtgatcctggaaaaaaggtttgggatgaaagaaggagttgtgtgccaatgaattgataagcaagtaggtatatcaaacattaactgcacaaaagataaataataatgtttaacttgagggaagctatgaaaaataactagatagaaataagataatggactatatgagacaaaaggggatgattggtatgaggagaatggtagagaacttgaataattttagattttagataaagtatgcatgtcaaatgattaatattctaaaagaggggaaatagagtttataacctccaaaccaaagagggagaggaagaattaaatttgaaaagtaagatatttccaagttaagatgcaaaatcaactaatcttccaagttaaggtgcacacacaactaatctatctcacttccaaccaaaagccccaatttaaagtggtatatataatatatatatagtatattattattatacaatatatattatattattatacaatatattatatggtatatatgtatatataatgtatatataatataatatatatatatatatataatatgtatgtatatatttgagactgagtctcactctatttcccaggctgaagtgcagtggtacaatctcagctcactgcaacctccaccacctgggctcaagcaattctcctgcctcagcctcccgagtatctgggactacaggtgcccaccaccacacctggctaatttttgtgtttttagtagagacgggatttctccatgttggccaggctggactcgaactcctgacctcaagtcttgcctgcctcggcctcccaaagtgctgggattacaggcatgagccaccgcgcctggtctcaatatatatttttaaatatttatttttaaaaaattaatggaagggagaagagttggggaagggaagacaacaacagtaacagtttggaagacatgaacatatgggccaaatgacttaacaacatagagaagaattctgagacagcagtgggccaccaaccacattctcaccatagaatcctcaaaatacttagtaattggaaactacaggcaactctaaaattggagagggtatgagagaggaatttaaaataaggaggattaggtaaaagctgagaagtagttagatgccaaatcccctccagtattccacaccatggcagtactgcctctcctaaccctagcagatgactgggggattattcttgaaagaaggaacaacagaaggtctctgcctggagggaggctgatgagcacagctgaagacacgctgcaagttgggattatgtgactgtagacatactgaaagctaagacttcccctaacccttttctgccactgggctcccagaatgctaaagtgaaacctatatcctttaattggaagattagaagagtcttttctgaggaatatgaacagtcacagaaaaaagacccaaagatacagaaactttgggtttccaaacaaatgaccaatccaggtcaccacagtgaaactcactgtgacttcatggactcagagtatctaatttttccccaattcttttttttttttttttttgagatggagttttgctcttattgcccaggctggagtgcaatggtacgatctcagctcaccgcaacctccacctcccagtttcaagcagttctcctgcctcagcctcctgagtagttgggattacaggcatgtgccaccacgcccggctaattttgtatttttagtagtgacagggtttctccacgttggtcaggctggtctcgaactcccaacctcaggtgatctgcctgccttggcctcccaaagtgctgggattacaggcgtgagccgctgcacccggccactctccccactcttaatcataacaaaatgaccatggattatgagataagcctggacctgagataagcctctaacattgtagggagggactaaagcaaacaggaaaagcactcagaagaaatagaaactatacaagaaaaaaacctccaaatttccaaacaaccctgttattaggcacagtggtacacacctgtagttccagctactcgtgagggctgaagtgagaggatcccttgagcccaggagttcgagaccagcctgggcaacatagcaagaccctatctcagcaaaacaaaacaaaaaacctgtttttaatgtcattagagagataagagaaaatattacatctatgaaacaagaacaggatgctattaaaaaaagcattaaaataataaaaaaaagtggtagtagaaatgcaaaactcgagagaaagttgaggaaatccctaaaatactaaagcaaaaagaaaagatgggaaaaagagagagacagcccaggaagcccagaatccaaataatccaaaaagagagaaaataaaaattaaagggaagaacacatcaatgaaattattcaagaaaatgtctcagaattggaggatgtagattgacagaacccacagaatgttcagcataattgttaaaatagacccactccagtgcatattattgtcacattgtagggtcttcaagacaaagagataaccttcaagtttcccaaatgaaaacaaaaaagctttcacaagaagatcaggaaccagaatgactttagaattcccagaagagatacttgaagcagaaaggcaatgaagcaataacttcaaaattctgaagaaaaattatttccaacctcgaattcatttttggtttgtttgtttgtttgtttgagacagagttttgctcttgttgtccaggctggagtgcaatggtgtgaccttggctcaccgcaacctctgcctcctgggttcaagggattctcctacctcagcctcccgagtagctggaattactggcacccaccatcatgcctggctaattttttttttttttggtacttgtgtagaaaaggggtttcaccatgttgcccaggctggtctacaattcctgacctcaggtgatccacctgcctccgcctcccaaagtgctgggattacaggcatgagccaccacacccggccacattcatattttattcatcaattttggacttcagctatcaacttcgtattagagtataatttgaatacaatataactatactggaaagatttagctctcttaaatcaaataagattatattataattttaaattaaatcaagattcagtgtttacattagaatgttcatgcaaatattcatagttgggtaatgtatatgatgattatgattcctttcttagttttggctttttcctaaagttaataattgcctagtgttttcattagcttggtttcctttgtatgtatcactaacccttctcacaccatctaagagcctcttgagagccaggcccggcagcttgaacctgtaatcccagctactcaggaggctgagctgggagaatagcttgagctaaggagtttgagactaccctgggcaacaaagtgagaccctgtctctaaaataaaaatgaacaaataaaacattttttaaaagcctcttggtacaattttccaaaagtttagtcacatcaggtgatccatcacttccatatcatttcttggagagctttattttcctccatcaaggagaccttgaatcttcttcaatctaggctagttgatctctggacatgctgcactgctagggtcttcccttgttatcgccttgtaatactctttccctttttcctgagttgggtttcatgccttcctccttgacttacttcttcttttttttttttttttttttttttttttgagacagagtctcactctgttgcccaggctggagtgcagtggcagatctcaactcactgcaacctccacctcctgggctcaagtgattctcctgcctcagcctccagagtagctgggactacaggtgtgcgctaccacaccccgctaatttttgtatttttagtagagacggggtttcaccatgttggccaggatggtctccatctctcgacctcgtgatccacccatctcgtcctcccaaagtgctgggattacaggcgtgagccaccgcgcccggccgatttacttcctttttgtgggtcacattcactagcagagggcatggttattataaccctcaattacgtccacgtgcctcatgagtcacactgctccaacgtgaacaagctgtcctctctggagcacaagcgtcatcttaggatctgcctttgtcatcattctggaaattcccataccttcccttctgtgtcgtatctcttatttcatgcatctacttgctgtttcctaatttatactctcattttggtagaggacaacttctaatagcttgtcgagaaagggtgtatgaagtaacttctgagatattgcatatctgaaactgtctgattctaccttcacactgaagcaatagcttgtttggttaaagaattcgaggttggaggccgagcgtgggtggttcgcgcctgtaatcccagcactttgggaggccgaggtgggcagatcacctgaagtcaggagttccatacaagcctgaccaacatgtagaaactccgtctctactaaaaatacaaaattagctgggcgtggtggcacatgcctgtgatcccagctactcgggaggtcgagtcaggagaattgcttgaacctcggaagcaaaggttgcagtgagccggaatcgcgccattgcactccagcctgggcaacaagagtgaaactccgtctcaaaatatatatatatatatacacacacacacatatatactatttagaaacaaagataatataaatataaatgtcaaaataaatggtggaaagagttggaaatggctgatgttgaggaaggtgactaagggagtgaagaggggtggacaggaaactaccatttttttaagcttctcagaatatttgggtatttaaatgtctatgatgtaaacacaccttcagcttgaacttgaaggacagaaaaatatataacaagcaaacacaactacaaggacaaactgacaaggatacttgacacagattaacttccatccttatacgagactttagcacacatttatcagtaagttatagatcaagcaaatataaaattcacaaaaaaatgaaaaatgtgagcaacttaaatttgatttaatatacattatatctagaacactataaaaaattcaagagtacatatttttcttaagtatatatggatttttttttctttttttttttgagacagagtctcactctgtcacccaggctggagtgcaatggcacgatctcggctttggctcactgcaagttccgccttccaggttcacgccgttctcctgcctcagcctcccaagtagctgggactacaggtgcccgccaccaagcccggctaattttttgtatttttagtagagacagggtttcaccgtgttagccaggatggtctcgatctcctgacctcgtgatccgcccaccttggcctcccaaagtgctgggattacaggcgtgagacaccgcgcccggcctatacggataatttataacaattggccatgtatgaggcaacaaagtttacctcaaatttaaaaaatcaatagtatactgataatattatctaactataacacaattaggtcagaagtcaaaaacagaaaactttcaaaacttccaatgtagaaactctatagacgaggttagcaaacattttttataaagggccagttattaactggagctattattaaaaattaaattacacacatttaaaaataataaataatattaaaaacaaaggtaatgaatactcaaaatcaccacttcttaattattttatattttactataacgtatgcttttttttttttctttttttgaaacaaggtctctctttgtcacccaggccggagtgcagtggcacaaccatggctaactgcagcctcaatctcccaagctcaaatgagcctcccacctcagcctcccaagtagctgggactacaagcatcatgacaaactgagtgtgccaccacactcagctaattttaaagtattttttgtagagacagggtctcactatgttgcccaggctgttgtccaattcctaggttcaagcgatcctcctgcttcagtctcccaaagtactgctgggattataggtgtgagccaccacgcccatcctaatctgtgattttgagtttatttacatctatcaattgtatctgtattgtgagaatactattattatggtatactattttatttcaatttttattatggtaaattatgcataacataaaatttaccattttaagtatgtttaagtgtacagatcagtggaattatatacattcataatgttgtgcaaccatcaccactatccatctctataattcttctcaatttgtaaaactgaaactctatacgcattaaacaataactttccattcccctctcccacagcccttggcaaccaccattctactttttgtctctatgattttgactagtctaagtacctcatataagtggaataatacaatatttacccttttgtgattggcttatttcactctgcattatatcatcaaggttcattcctattgtagcatattgcagaatttccttcctttttaaggctaatattgcattgtatggatatatcacattttgcttatccattcgtctatccatgggcacttgggtttcttccgtgttttagctagtgtgtgaatcatgctgctatgaacatgggtatacaaatatctctttgaaaccctgctttcagttattctgggtatatacctagaagtaaaatggctagatcatatggtaattctgtttttaaactttttctattttgagatggggtcttgctctgtggcttaggctggtgcacagtggaacaatcatagttcactgcagcctccaattcctggcctcaagtgatcctcctgcctcaaccgcctgagtacatttttaattttttgaggaaccaccatactgttttccacagcagctgcaccattttatgttcccaccagcagtgcagaagggctctaatttctccgcatccttgctaacactcgttattttctttttctttctttttctctctctctttttttttttttgttttttgtttttgtttttgtttttgttttttgagacagcatctcgctctgtagcccaggctggagtgcagtggcgtgatctcggctcactgcaacctccacctcccgggttcaggggttcaggcagttctctaattctcctgcctcagcctcccgagtagctgggattacaggtgcctgccaccatactcggctgatttttgtacttttagtggagatggggttttaccatgttggccaggctggtcttgaattcctggcctcaagtgatccgcctgcctcagccttccaatgtgctgggattacaggtgtgagccaccatgcccggcctattttctgttttatctttctttttttttgtttttgtttttttgtttttttgagatggagtcttgctgttttgcccaggctgtagtacagtagagcaatctcggctcactgcaacctctgcctcccgggttcaagtgattcttctctctcagcctcccgagtacctgggactacaggcacacgccaccatgctcagctaatttttgcatttttagtagagacggggcttcaccatattggccaggctggtcttgaactcctgaccttgtgatccacccacctcggcctcccaaagtgctgggattgcaggtgtgagccaccatgcccagcctattttctgttttttaaatagtagtcatcctaatgggcatgagatggtgtgagacaaagtggcaaatgtttgcctctgatcagcccctgccttgagaagccatgatttctccttctgcttgtcagcccaacttcacaaacccttgactcagcaactgagcgtggccctctggaagaacgccttgaagacgacaagcagaacagagcacaggctcccacatctcttccctgaatcactgcatttttagaaaaagtaagttcaaagatcctagcccttgccttttcctgtacgtaagatagtgtccaacaggattaatgattatgtcaaactttgatgagattttgctgtaacgtaacttctgagcacatttgatgtaacttctgaacacaggcagagcctccccacctgatacctaaactgtgggctgaaacgctgctttgaagcagtctaacaaaaactctttgactctcacggttgcaatcctcagtaagactctgaataaagctaacttttaagctgatttttttctttgacagtgatatctcgtagttttgatttgcatttccctaataactagtaacgttgagcatattttcgtgtacttactggctgcttgtatatcttctttggagaaatgtctacttaaatcgtttgcccatttttaaatcaggttgtttgattttttgttgctgtgtttcaggagttatctatataatctggatattattattagtagtagtattagtattagtattttgaaacagagcaagactctgtcacccaggctggagggcagtggtgcaatctcggctcactccaacctccgtctcccaggttcaaacgattatcctgcctcagcctcccaagtagctgagattactggcacgtgccaccactcccagctaatttttatatttttgatagagacagggtttcaccatgttggccaggctggtcttgaactcctcgcttcaagtgatccacccccttcagcctcccaaagtgctgggattacaggcatgagccaccgcacctggcctagatactaattttttatcaggtatttgatttgcaaacattttctcccattctgtgggttgccttttactccgttgacagtgtctttaatgcacaaaatgcttttatttttatttttattttgctttatttattgatttattttttgagactgggtctcctctgttgcccaggctggagtgcggtggcgcaatcacagcttactgcagcctcaacctcccaggctctggtgatcctcccacctcagcctcctgagtaactaggactacaggcatgtgccaccacacccagctaatttttttgtattttttgtagacagggtttcaccatgttacccaagctggtcacgacatcctgagctgatgcacgatctgcctgcctcggcctcccaaagtgctgggattacaggtgtgagccactgtgcctggcttattttaattttctttaagtttgatttgtctattttttcttttgctgcctgtccctttggtatcatatccgagaaatcattgttaaatctaatgtcatgaagcttttactctatgtttacttctaggaattgtattgttttagaccttacacttacttaggcctttgatacattttgagttaatttttgtatatgctgtaaaatggtccaacttcattcttttgcatgtgaatagcctacataatggtgtgctattgagcatctcttcccagctctgtattcagtggtatcacattgatagcttggaatcagacataatgggagtatttacacaatagtaattggcaaatactacaaaacgagactttttttttcagggatctacttgttaaatgtttatcagcacaccattggatgtacaactttgaattgcatccaaagaataaaatggagtgaaggatgaatagatgcatgttaaagcaaatatagtaaaaagtagaatcaagatgggtatgtatcatatgttcactgttccattatttcaactttgttttatatttgaaatttttcatactaagatgttgggaaaagtaaagtggggaaaggcagcaaaaaaagagagacactttatttttttattttttttgagatggagttttgctcttgctgcccaggctggagtgaaatggcgcaatctcggctcactgcaacctctgcctcacaagttcaagcaattctcccgcctcagcctcctgagtagatgggattacaggtgcccaccaccacacccggctaattttttgtatctttagtagagacgggatttctccatgttggccaggctggtctccaactcctggcctcaggtgatctgcctgtctcagcctcccaaagtgctggaattataggcatgagccaccatgcccagccaagagacactttatatactaggggaaaatgatataaaagatgcttgacatctcataagtagtaacgaaggccagcaaacaatggaactaatttttatttttttcaagagaaaggttctcactatgttacccaggctggagtacagtggctattcacagacacaatcataatgtactatatccttgaactcctgggctcaagggatcctactgcctcagcctcctaagtagctgggactacaagcacgctccaccacgcccagcttggagctacatttttaaagtgctgaaagcggggaaaaaaccgtcaacccaaaattatatatccaacaaaattatcctttaacaatgaaggtgaaatagtgacattttcagttaaacaaaagctgagataatttgtcacttggagactgcacctcaagaagtggtaaagaaaattattcacactgaagataaattatactacattatacagatctacagaaataaatgaaagacattggaaatggcaaatttgtaggtaaatacagaaattattttttcttttcttaatctctttttaatatattaaaattcagttatccataaaagcagtaatttaatctgaaagtaaaacacaagaagcaatactagagtttgtttaatatattatgttttagctttgaaagccatagaaatcaattatcccagttttcttcctataaaagaccatttttccaaagccttatatgaaaacaattttaatttgaatataatgacagatgatatttcataatatttaaaatataaagtgaagtcaatgactcaaaaaagttatcactgcgatgagtttgaggggaaatttcatcatttatatcataacagatataaaacataatggtacaactttttagtgcttgacaggaaggaatcatgattttaaaaaaggtcaatatgaaacactttaatcatagtagaaatatctaccatttgaaatgcatccatgctctttagtatactcacattaaagtatatttattttcacatgtgttataactgctaccgcaaaggaaaaatattgtcttattttccaagaaatacacacagaacatttttttcttcatggaactagtgcaaaccaatataagatctaaattcttcacataatatgtaaaacaggagaagttcctcagattgattttttgaagtctagaatgctggcactttccaagtaggcaacagttcattcctgtaatctggctcagagctgctgctgactatggacctggagcagcaaacatgatttctttttaagtttcttcttttccactggtgtttttctatttatctgtgaccaggtcacaaaatagctcattaaagtttaactttgagccgggcgtggtagctcacgcctgtaatcccagcactttgcgtggctgaggcgggtaggtcacttgaggccaggagttccaggccagcctggtcaacatggtgaaaccctgtctttactaaaaatacaaaaatcagccgggcatggtggcgggtgcctgtaatcccagctactcgagaggctgaggcatgagagagaattgcttgaacatcacttgagcctgggaggcagaggttgcactgagctgagatggtgccactgcactccagcctgggcgacagactgagactctgtattaaaaaaaaaaaaaagaagtttaactttgaccttgcaaaaggttctaaaaggcacagttataccactgtctgcctgttctttgccaactactcactcatctccaggtcacatttattcccaacaaaatcattgaaacatcttctgtgtccttaacctataaaatctgttccttcaggtcctgtaagtcattaaacatggactgagctgttatagaatacactagtgtggccaggcgcggtggctcacgcctatattcccagcactttgggacgctgaggcaggcagttcacgaggtgaggagatcgcgaccatcctggctaacacagtgaaaccccgtctctactaaaaatacaaaatattagctgggcgtggtggcaggcgcctgtagtcgcagctacttgggaggctgaggcatgagaatggcgtgaacccaggaggcggagcttgcagtgagcccagattgcgccactgcactccagcctgggtgacagagtgagactccgtctcaaaaaaaaaaaaaaaaaaaaaaaaaagaatatactagtgcaggccaggcatggtggctcacacctgtaatcctaacgcttttggaggccaaggcggaaggatcacttgaacccaagagtgtgagaccagcctaggcaatatagtgagactccgtctctacaaaaaataaagaactagccgggcatggttgtgcacatctgtagtcccagctatttgagaggctgaggcgggaggatcctgtgagctagggaggtggatactacaatgagctgtgatcgcaccactgcgctccagcctgggcaacaaagtgagacctgtctttataaaaaaaaaaaaaaaaaaaaaaagagaatatactagtgcaaacccttggctattcttcatacacaaatccctcattgctgtaagttgctctgtccctgctatatccaagattttgagcatgcgctattggcaatcttcttcaatttgcttttggcaggaatcttctatcattggatcatatttttcaacaaaaattccctgaataaactaaattgtcagagtagacttcctaacacctcctgaaccaaggaccattagcttgtactcatgcatgttagggtctgtttaaatactgacaatctagtaaatgccattgaaggtgctgtgggacacacatgcttttttttttttttttttttttttttgacaagatctccctctgttgcccaggctggagtgcagcggcatagtcatagttcactacagcctcaaactcctgagctcaagggatcctcccacctcggcctcccaaagtgctgggattacaggcttgagccatctctcccagccctcacactcttatacacaggataaccgccctgtgggaatctattcctatctccttcccctcctcctcccacctctcaaccgtggcttctgccccggctctgcatggtgatggcctctggagcactggtctcttttcacaatttttataaagtataactattttttaaaaaattaacagctttgttgagctataattcacacaccctacagtttccctatttaaatgtacaattaaatggtttttaatattttcacagagttgtgcaaccatcatcacagtcaattttagaacattttcatcacccgctgctatgaactaaattgtgttccccccccggaatttgtatgttgaagccctaaccctcagtatcattgtacagcagtttcctcttacagtataatggcacagaaagtagttttactttcttcaattttagttacccgtagttaaccatggctgaaaatattacatggagaattccagacataaacaattcatgggccgggcgcggtggctcacgcctgtaatcccagcactttgggaggccgaggcgggcggatcacgaggtcaggagatcgagaccatcctggctaacacaatgaaaccccgtctctactaaaaatacaaaaaattagccgggcgtggtggcaggcgcctgtagtcccagctactcgggaggctgaggcaggagaatggtgtgaacccgggaggcagagcttgcagtgagccgagatcaagccactgcactccagcctgggcaacagagcaagactccgtctcaaaaataaataaatatataaaaaataaataataaacaattcataaggtttttgttttgttttgaaacaggatctcagtctgtcgcccaggctggagtagagtggcatgatcatggctcaccgcagcctcaatctcctgggctcagatgatcctcagcctcccaggtagctgggactacaggcacatgccaccacgctcagctaattttttgtattatttgtagagacagggttatgccatgttgcccaagctggtctcgaagaattgtgtgccattctgagtagcgtgatgaaatctcacgccgtcctgctccatcccacctgggacatgagtcatccctttgtccagcatatcaatgctgtgtatgctacctgcccattagtcacttagccaccttggttatcagatcggctgttgtagaatcacagtgcttgtattcaagtaacccttattttacttaataatgggtccacaaagtgcaagagtagtgatgctggcatattgttataattgtttaattgtattattatttttgttaatatcttactgtgcctgatttataaattaaatgctctcgtaggtacaagaaaaatgtagtatacatatggtttggtactatctgtggtttcaatcatgccctgggggtctgcaataagggcggactaggatatgtggagatggagtctttgacaggtaattaggtttagatgagctcaggagggtagaagcatcaggataggactagtgccttataagaagagacacaggagagcttgttcttgctctttttccaccatgcaaggacacagtgtgaaaagtggccatggggcacatgttctcaggacctcctcgagctgtgtcatgggggaaaaaaaaaaaaaaaggaaagaaagagagaaagaaaatggccatcttcaagccaggaagagagccctcaccagaactcgaccatgctggcaccctgatcttgaactttcagccgccaaaactgggaagaaagtttctgttatttaagccacccagtctatggtattttgttacggcagccagacctaactaagacacccaccaaaacaaataaacaaaaacaaaacctgtacttgttggtagtcaactcccctttccccagcacctcctccacaggtctaggcaaccgttgaactattttctgtcactacagattttcctattctgtacatctcataaaaatggaatcatacagcttgtggtcttttgtgactggcttcattcacctagcataatgttaaacaaaaaataacattgtattttggggtttacaatgtatgtataaataaaatatatgacaacagtgttacagaagaaagagaagtaaacagaattatattattgtaattctacataggctgtatattttaataactagctcaaccactaaaaataaaaagaggcataactaaaaagccaatagaggaaataaataaaatagagttctaaaaatataatcagttaacctaaaagaaggaaagaaaggcgaattgatgtacaaatagacgggataaataaaaaacaaatagcaagatgttaaacgtaaatacaaccatttcaataattacatcaagtataaatggactaagccattcaattaaaaggcaagagatttacagactgggggaaaaaaagacccaactatttgttatctacaagagatgtactttaaatgtaaagacacagatcagttgaaagtaaaaggatggaaaaaggatataacatgctaactggaagcataagaaagctagtgtaactattttaatatcagataaggcagacttcaagacaaggagtattggccagacacagtggttcacacctgtaatcccaacactttgggaggctgaggcaggaggattgcttgaggtcaggatttgaagaccaacctgggcagcagagtgagaccctatctctacaatacatatattttaaaataaatagataaaataattgagacagggtcttgttatgttgctcaggctggtcttgaactcctggaccagcctgagctggtcccaaagtgatgggattacaggcatgagccaccacacccgatttcaattatttaaaaaaagaaaagacaagagtgttaccagaaataaaaagagacatgaccataatgacgaaacagtcaatccttcagaaagctataccaatgttaaacatgtttgcacctataacaaagattcaaaatatatgaaaaggccaggcacagtggctcacacctgtaatcccagcactttgggaggctaaggcaggccgaccacttgaggtcaggagttcgagaccagcctggctaacatggtgaaacctcgtctctattaaaaatataaaaattagccaggcgtggtgttgcatgcctgtagtcccagcttactccagaggctaagacaggagaatcgcttgaactcaggaagcggaggttgcagtgagccgagattgcgccacagcagaccaagactgtttcaaaaaaaaagacaaaaacaaaaaatatatatatgaagaaaaactgacagagcaaaagggagaaataagcaaattcacaactgtagttggagatgtttacacctctctcaataattgatggatcaagtagataataaatcagaaaacatagatgatttgaacaattctaacaacaaacttgacctaattgacatttataaaatgctatttacagcaactgcaaaatacacattcttttcaaatgcaactagaatgtccacccagatagatcatattctggtccatggtctatttattgaagctcgacaaattttaccagatttttcatgtgggatgaagccaacatggtcctctaaaggaaatttatagctttaaatgcgtatattagaaaagcaaggggctgataatcagataggtcttaaattaagaagtcagaaaaagaatactgaaaaaaaaagaaagcaagcatgttcccatgcttccaccagggaacacaagaatggttccattgaactggaagttgacactgtctcctagacttttggggcttttctaccattgaataatcaggaaaaagatgagatcaaaatattggatcattattggttattgatcctgattttcaaaaatgtgaaatagaagaaatagggttgctgctgtacaatgggagcaaaaaaaaagagctacttagaatctaggggaatatcttgcagatggctcctaatatcatatttaggggttaaaagttaatagaaagcaacctcataagggcaccaagggcccagattctttagaaataaaggtctgggtcacaccaccagatgaagagctgctgggctgagttgctgggctgagctgctggttgtgagctaagagagcatggaatgagtagtggaaggaggaaattacaaagatcaactctggcctagcgatcagttgcataaatgaggactatagtatgcacccatattttcttatttgctgtgttgacattttttatgaattttccccattttataaaaatatttattttttgttagttaactttacaatctatttgcagaataccaaggcaggactatgacagaattaaaagaaaatgggacattacccagagatcctagtcttggagctagatgcagtaagtcttggggctttcaaatgtcctcctatggggggaagagtaagttcattttcatttgtacacaggataaataaattatgagttagaagagtttgttgttattgttttgggaatttaaatatgaaagcagatgttgggcagccaaggggaggagtgcagtgaacatgcatcatgctttgtgtatcttctgaataggttttctatttggggaaaactaggatcttttgaatagctttcctatttggggggcattcctgacattatgcagttcatcttaccaacagaggagctagaatttcttttcccttgctgctagaactcaggctgtgactgaggctctatactatttttttaacttttatttaggttgaggggtacctgtgcaagcttgttatataggtaaactcaggtcacaggagtttgttgtacagattattttgtcacccaggtactaagccttgtacccaatagttattttttctgatcacctccctactcccatcctccaccctcaagtaggcctcagtgtctgttgttcccctctttgtgtccataagttctcatcatttagctcccacttataagtgagaacatgtgaatttggttttctgttcctgcattagtttgctaaggataatggcctccagctgcatccatgttcccacaaaagacatgatctcattctttttatggctgcataatattccatagtgtatatataccacatttcctttatccagtctgtcactgatgggcatttaggttgattccatgtctttgctattgtgaatagtgcttcattgaacattcgcatgcatgtgtctttatggtagaatgatttctattcctttgggtatatacccaataatgggattgctgggtcaaatggtagttctgtttttagcactttgaggaatcaccacactgctttccataaaggttgaactaatttacactcccaccaagagcgtgtaagtgttccctcttctcctccacttcaccagcatctgttattttttgactttttaataatagccattctgactggtgtgagatggtatctcattgcggttttgatttgcatttctctaatgatcagtgatattgaggttttcttcatatgcttgttggccgcatgtatgtcttgttttgaaaagtgtctgttcatgtcctttgcccactttttaatggagttgtttggtttttttcttgtaaatttgttttaagttctttatagatgctggatattagacctttgtcacatgcatagtttgttaatattttctcccattctgtgggttgtttgtttactctgttgatagtttcttttgctgtgcagaagctcttaagttcaatcagattccatttgtcaatttttgctcttgttacgattgcttttggtgttttcatcatgaaatctttccctgttcctatgtccagaatggtattgcttgggttgtcttccagggtttagggctttaattcatcttgagtttatttttgcttatggtgtaaggaaggggtctagtttcaatcttctgcatatgcctacccagttctgcatatcccagcaccatttattgaatagggattcctttccccattgcttgtttttgacagctttgttgaagatcagatggttgtaggtgtacatacttatttctgggttatctattccattctgttggtctatgtgtttgtttttgtaccagttccatgtcattttggttactgtagccctgtagtatagtttgaagtcaggtaacatgatgcctctagcattgttcttttcactcagaattgccttggctatcggactcttttttggttccatatgaattttaagataggttgtttttttttttttttttttttgagacagagtttcactcttgttgcccaggctggagtgcaatggcgcaatcttggctcactgcaacttctgcctcccaggttcaagcaattctcctgccttagcctcctcagtagctgggattacaggcatgtgccaccatgcctggctaattttttggtatttttagtagaggcagggtttctccatgttggtcaggctggtctccaactcctgacctcaggtggtccgcccaccttagcctcccaaagtgctgggattacaggtgtgagccaccgcgcccggccaagatagttttctctagttctgtgaagaatgtcattggtagtttgataggaatagcattgactctgtaattgctttgggcagtatgtccattttaatgatattgattcttcctatgcatgagcatgaaatgttttccatttgtttgtgttatctatgatttatttgagcagtgttttgtaactctcattgtagagatgtttcacctccctggttagctgtattcctaggtattttaatctttttgtggcaattgtgaatgggattccgtccctgatttggctcttggcttggctgttgttggtgtaaaggaatgctagtgatttttgtatgttgattttgtatcctgaaactttgctgaaattgtttatcacctgaaggagatttgggctgagactacggggttttctagatgtacaatcatatcatctgcaaacaaggatagtttgatttcctctcctcctatttggatccctttatttctttctcttgccttattgctctggccaggacttccaatactgtgttgaataggagtggtgagagagggcatccttgtcttgtgctggttttcaaggggaatgcttccagcttttgcccattcaatatgatgttggctgtgggtttgtcatagatggctcttattattttgaggtatattccttcaatgcctagtttattgagaatttttaacatgaaggatgttgaattttattgaaagccttttctacatctattgagataatcaatcaagattgccctcaccaatctattgaggcctcgaacagaacaacagggcagagtaaaggtgtaacaaaacaaaacaaaacaacaacaacaaaaaactttgcttttcctattttctactctcactcagtacaatatttctgacattggatgtgtggagttattttccccacacaccaagcagtcaattctctggtggacatcaactggatggcctataattcaattcaattctgacactatctgcctggagatagtgtcagatcctacaggttgagggctcaatcccacaagaataccccccatttcagataccagtcacaagtaataagttgtcatctatacttctgaccaatcagatataaactggggtttctaccatctccttctcaggttcaattaatttgataagacagctcccacagaactcaggaaaatacttacaattacccatttatttacttatttgtttatttaagtagtcatcatcattggatacccatttattctaaagaatatcacggccaggtgcagtggctcatgcctggaatctcagaactttgggaggccaaggcaggaggatcagaccagtctcaggagtttgaaaccaccctgggcaatatggcaaaaccccatctctacaaaaaataaaaaaattagccaggcatggaggcacacacctgtggtcccagctactcatgaggccgaggtggaaggatcacttgaggccgggaggttagggatgcagtgagccaagatcatgccactgcactccagcctgggcagcagagcaaggccctgcctcaataaaataaaattaaaattaaattaaattaaaagggatttcacaaaggatacagatgagcagccacatggaagagatgcatagggcaacgcatgtgggaagagcacggagctttcatgccgtctccaggctcaccaccctccaagcaccttcaacatgttcagctatttggaagctctccaaaccaattccttttgggtttttatggaagcttcattgtgtaaacataattgattaaatcattggccattggtgaccaactcaagctttaacccatctcccctcctgagaggttgggggtgggagtgaaagttccaaccctctaatcatgccttggtttttctggtgaccagcccctatcctgaagttccctgggagtcgtcagccgcctcattaggatacaaaagatgctcttatcactgtggagattccaagggttttagaagttgtgggccaggaaacagggacaaaaccaaatatatatttcacaatatcacaaacaggaaattctcttcctctcttcttgaactgggacatccatcttctcctgccctgggacatcagagttcccggttctcagtcctgccagactactggacttacaccagagcctcccaacctccaccccctctcatcaggcatccttacttggactgggagttacatcatcaggtctcctggttcccaggccttcgggttcaaactgaattacacgctggctttggtcaatgaaaagagtcaaatcctataaaatatttaaggaggtttattctgagtcaagtgtgagtgaccaaggcctgaggcacagtctcaagaggtcctcccaacatgtgcccaaggtagttgggttacaatttgatttgataaattttagggagatgttaagacatcagtcaatacatatgggttaggccagatgccgtggttcacgcctgtaatcccagcactttgggaggccaaggcgggtggatcatttgaggtcaggagttcgagactagcctggccaacatggtgaaacgctctctactaaaaatacaaaaattagttgagtgtggtggcgcacgcctgtagtcctagctactcgggaggctgaggcaggagaattgcttgaacccaggaggcagaggttgcagtgagccaagattgagccactgcactccaccctgggagacaaagtaagactgtcaaaaaaaaaaaaaaaaaaaagcaaagaaacattttcacgtaaaatattttgatttccttctatttctgttatgtgatgttatgccacagtcaagttggaaagtacactacattatatagggttaaataaaatccatctgatgagattttatggtttgtagggcataactcctcaggtcccttggataagaatttgggcaagcaaggaaaaaggtcagagtttagccctcaccttcctggttctccagcttatagatgacagatggtgggacttcttttttttttttttttttttttaaatttatttttttattgataattcttgggtgtttctcacagagggggatttggcagggtcatgggacaatagtggagggaaggtcagcagataaacaagtgaacaaaggtctctggttttcctaggcagaggaccctgcggccttccgcagtgtttgtgtccctgattacttgagattagggatgggtgatgactcttaacgagcatgctgccttcaagcatctgtttaacaaagcacatcttgcaccgcccttaatccatttaaccctgagtggacacagcacatgtttcagagagcacagggttgggggtaaggtcacagatcaacaggatcccaaggcagaggaatttttcttagtgcagaacaaaatgaaaagtctcccatgtctacttctttctacacagacacggcaaccatccgatttctcaatcttttccccacctttcccgcctttccattccacaaagccgccattgtcatcctggcccgttctcaatgagctgttaggcacacctcccagacggggtggtggccgggcagaggggctcctcacttcccagtaggggcggccgggcagaggcgcccctcacctcccggacggggcggctggccgggcaggggggctgacccccccccccacctccctcccggacggggcggctggccgggcggggggctgaccccccacctccctcccggatggggcggctggccgggcagaggggctgcccccccacctccctcccggatggggcggctggccgggcggggggctgacccccccacctccctcccggacggggtggctgccgggcggagacactcctcacttcccagatggggtggctgccgggcggagaggctcctcacttctcagacggggcagctgccgggcggaggggctcctcacttctcagacggggtggttgccaggcagagggtctcctcacttctcagacggggcggccgggcagagacactcctcacttcccagacggggtctcggccgggcagaggcgctcctcacatcccagatggggcggcggggcagaggcgctccgatggtgggacttctcagcctccatagttgcatgagccaattcccataacacatctctttatacatgtatacatttgtataaatagacgtgtgtgtgtgtgtgtgtgtgtgtttatagtctgtttctctggagaacgctgacaatacagcttctcaggagtaatcataaaggaggtctggtacctaatgctgagcactgttggtgtagacagtcgtagcagtggggtctgtgctagagaagccttgtggtctggtttgagtattgttaatggtagcagaggctctaagcctgaactctggctgtcccagggatttttcaaaagacttaatcaattattttctgctaaaactagttacagtaaagtatgttatttgctattaggaatgctaactgggccaggcatggtggctcacgcctgtaatcctaacactttgggaggccgaggctggcggattacgaggtcaggagttcaagaccagcctggccaacatgaggaaaccccttctctactaaaaatacacaaattagccagacgtggtggtaggtgcctgtaatctcagctactcgggaggctgaggcaggagaatcactcgaacctaggagacagaggttgcagtgagccaagatcatgccattgcactccaccctgggcaacaagagcaagactccatctgaaaaacaaaaaaaaaaaacaaaaaaaagaatgctaactgatacacactgagagttttgattgttgttgttgtttttaattacaaaaatagaatcacggtcagagtcagtggcttacgccgtaatcccagcattttgagaggccggggcaggaagattacttgaggtcagggatttgagacaagcctgagaaacatagcaagatctcctgtctcctcaaaaaaaaaaaaaaaaatgttggctaggcatggtggctcacgcctgtaattccagcactttgggaggccaagatgggcaatcatgaggtcaggagattgagaccatcctggctaacacggtgaaaccccgtctctactaaaaatacaaaaattagccgggcatggtggcacgtgcctgtagtcctagttactcaggaggctggggcaggagaatcacttgaactcaggaagtagaggttgcaatgagccaagattgcaccactgtactccagcctgggcaacaaagcaagactctgtctcaaaaataaataataaataaatactgaaaaaattagccaggcatggtggtgtgcacctgtaatcccaactacttgggagggtgaggcaggaggattgcttgagctcaggagttcaaggctgccatgagccatgatcatgccactgcattccagcctgggtgagagaggaagaccttgtctcaaaaaaaaaaaaaaaaaaaagcaatcattttgctgcattcatttaagagtgtactgatgtactgtgaagattcctccatgtaccttcatataggccgttctttttaatggctgcataatatttcattgtacagatacttcataatttatatatgtaatccttaactattaaaaataaagttttaatgaatattcttgtacaaaaaaagtttggacatttgaataagtctgcaggatagatttcctagaaggaagattcctgagtcaaaggaatttgcatttaaaattgggataaatctctccctccccctccccctcccccgctccctctccccatggtctccctctccctctccctctccccaccgtctccctctgatgccgagcggaagctggactgtactgctgccatctcggctcactgcaacctccctgcctgattctcctgcctcagcctgccgagtgcctgcgattgcaggcgtgcgccgccacgcctgactgcttttcgtatttttttggtggagacggggtttcgctgtgttggccgggctggtctccagctcctaaccgcgagtgatccgccagcctcggcctcctgaggtgccgggattgcagatggagtctcgttcactcagtgctcaatggtgcccaggctggagtgcagtggcgtgatctcggctcgctacaacctccacctcccagccgcctgccttggcctcccaaagtgccgagattgtagcctctgcccggccgccaccccgtctgggaagtgaggagcgtctctgcctggccgcccatcttctgggatgtgaggagcccctctgcctgtctgcccagtctggaaagtgaggagcgtctttgcccgcccgccatcccatctaggaagtgaggagcgcctcttcccggccgccatctcatctaggaagtgaggagcgtctctgcccggccgcccatcgtctgagatgtggggagcgcctctgccccgccgccccatctgggatgtgaggagcgcctctgcccggccgcgaccccgtctgggaggtgaggagcgtctctgcccggccgccccgtctgagaagtgaggagaccctccgcccggcagctcccccgtctgagaagtgaggagcccctccgcccggcagccgccccgtctgagaagtgaggagcccctccgcccggcagccaccccgtctgggaattgaggagcgtctccgcccggcagccaccctgtccgggagggaggtgggggggtcagccccccgcccggccagccgccccgtccgggagggagacgggggggtcagcccccccaccggccagccgccccgtctgggaggtgaggggcgcctctgcccggccgcccctactgggaagtgaggagcccctctgcccggccaccaccccgtctgggaggtgtacccaacagctcattgagaacgggccatgatgacaatggcggttttgtggaatagaaaagggggaaaggtggggaaaagattgagaaatcggatggttgctgtgtctgtgtagaaagaagtagacatgggagacttttcattttgttctgtactaagaaaaattctgccttgggatcctgttgatctatgaccttacccccaaccctgtgctctctaaaacatgtgctgtgtccactcagggttaaatggattaagggcggtgcaagatgtgctttgttaaacagatgcttgaaggcagcagcatgctggttaagagtcatcaccactccctaatctcaagtacccagggacacaaacactgcggaaggccgcagggtcctctgcctaggaaaaccagagacctttgttcacttgtttatctgctgaccttccctccactattgtcctatgaccctgccaaatccccctttgcgagaaacacccaagaatgatcaatcaataaataaataaataaataaaattgggataatggctgggcacggtggctcatgcctgtaatcccagaactttgggaggccgaggcaggtggatcacttgaagtcaggaattcaagaccaacctggccaatgtggtgaaaccctgtctctactaaaaatacaaaaaaaaaaaaaatgagctgggcatggtggtacacacctgtaatcccagctactcaggaggctgagacaggaaaaccgcttggacctgggaagcagaagttgcagtgggccagaatcctgcctgtactccagtcttggcaacagagcgaaactctgcctccaaaaataaaaataaaattaggatagttactgttttgtttttgtttttattttttgtttcattttttattttttgagatagtcactgttaaattgcttccagaaaggtcatacaaatttatagtaccactcaaaagttagcccatttccccctgcaatcaccaattctttaaatttttttctaatctgttaggcaaataatgctttattcgactattgctgacattcagtagcttttttaggtttattggtcatttaatgtcttctgcagattgcttgttcaaatccttttttctttgtttttttttttttgagtcggagtctggctctttcgcccaggctggagtgcagtggcacaatctcggctcactgcaagctccgcctcccgggttcacaccattctcttgcctcagcctcccgagtagctgggactataggcgcccgccaccaccccctgctaattttttgtatttttagcagagatggcgtttcactgtgttagccaggatggtctcgatctcctgacctcgtgatccgcctgcctcggcctcccaaagtgctgggattacaggcgtgagccaccgcgcccagcctcaaatcctttttcctattggactttcagccattttcttagtgatttgtaggagtttttcatattttatatatactttgctttggctcttccacatatttttcttcccagcaagttcgtgtctcaactttgtttaagagtctttagtcttagagaagtataaaatatttgttattaggtacagtttaagtcttgcatttcagtttgtttacttctttgtttcaaaaaggactttcagggcctatgagactacacaagatgaataagttcaggcaagggcagactaaaggtggaatataaagatgtggccccaagataacttaaaagccacaaacgcctccaatctgggcggcacaagttcatgcttggtcaggagggttgatgcctttgttcagggcaccctgattggggctggcactgtagcagcggcttggagatactgctcacctgttaggtgcgtagctgggctgcccggtcccacccatccctggccatgcccccaccccaccctcaagctgcgcctgggctgggaatcctgtggtggcccatgcctcctacatgtgacgcccatgcctcctgcgtgtggctctgagaaatgacatcgcgttccaggcaacagtttgtcccagggcctgtatattgtttggtggttttggtttttgtttttctgtgaccgagttttgctcttgttgcccaggctggagtgtgatggagctatctcggctcactgtaacctctgcctcccaggttcaagcaattctcctgcttcagcctcccaagcagctgggattacaggcacacaccaccatgcccggctaaatttttctattttcagtagagacggggtttcaccatgttggccaggctgacacggctcccagtttggcttactttaccaaagacccactttcccaatctctagctgctactaagaccttaaacatctcctaggataagagttatgacacagggctccaatgaactcttttggttttctgttttgttttgttttttgagacggagtcttactctgtcacccaggctggagtgcaatggctctgtctcagctcactgcaacctctgcctcccaggttcaagcgattctcctacctcagcctcccgagtagatgggattacaggcgcctgccaccacacccggctaattttttatttctttggtatttttagtagaggtggggtttcatcctgttggccaggctggtctctaaggctggtctcgaactcctgatgtcaggtgatccacccacttcagcctcccaaactgctgggattacaagcgtgagccaccacgactggcccaatgaactcatttaaaggaagaaagctgagaggagaaatagagaacttctgcctctctgtgcctccaactccaaataggtcttcggctgcaggtagaattttaacaacccaagaggctctttggaaggctggctcttagaggattgggggaatccagattttttgtgtgggggccgggggaatccagatttgaatgaggtacttctttgatcagtgaagctgggttaggtgttgttaaatatcccatgacccactaaatatggatcccaacacttagcatggtctttaactgcatatttatttttgtcattatttaatagtctgtctccctcaccaaaccataaactcccctaggtttgtccccattgcccagcatagtgcctgacaccctaacacatagttaagagctcagtaaatgtgttttgtttgtttgtcttttcggggttatttttgagacagagtcttgttctgtctcccaggctggagcaaagtggcacaatcttagctcactgcaacctccgcttcccagattcaagcaattctcctgtctcagcctcccaaatagctgggactacaggtgtgcaccaccatgcccagctaatttctgtatttttggtagagacagggtttcaccatgttggccaggctggtctcaaactcctgatctcaagtgatccacctgcctcggccttccaaagtgctgggattacaggcataggccaacacacctggccactcagaaaatgtttgtttagcaaatgatggttgaatggatacattctgctcaccagagattttgatagactctcactcaatgataaagcccagtaactaaatagcaccaggagcacacctgtaattgaacaaagttaggtttcttgacttgctgcagtgaaggagcatacaccgtgggggactgcgggatgtcttagtaagaggcagtgaggatgggcttgtttggaattgtgctgggtgattttggagggtatttaaggaagcaagagtttgttctgggttgagcactgtcgggaagcaagggcaatttgatcattgggcatcttaataatttttatctaggaggtaggagggtccaagcagggctagagttgtcgtcggttaaaaaaaaaaaaagaaagaaaatggtagtcactcatgtttgccaagggagaaggatgcttggtcattttgagtgtcatagtgtccttgatcttgccttgttctatcatggtcacagagaagcctcatctgatgtcaatattctgtgatattttgtcatgttcagcaaagaacatgacagcctagctgttggttgccaggccagtagggtgaccaccccagtttacctgggaccaagggcttacccaggatgcaggactttcagtgctaaaactgggagagtcctgggaaaccgaggacagttggttaccctatgggccaattgcaagctgtcaggatttttttctctctcattaggtataatgatattaacacttcatatggtacttgtcaaatgctcccccagtcactgaaatacacagtatatgtgtagacggaaacatttttttttttgagatagagtcttgtcctgtcacccaggctggagtgcagtggcacgacctcaactcactgcaacctacacctcctgggttcaagcaattctccttcctcagcctcccgagtagctgggattacaggcatgcccaccatgcccagctcatttttgtaattttagtagagacggggtttcactgtgttgcccacgctggtcataaactgaagtatgctaacacacgcatgcatgagtccaggatacacactaactttcataaatccattcacacaaacacacatactacaaacaaatacatatgcaccatacatatgtacatatatatatcacaaaccctacgtacatatacatacatgtacctaaacactcatacgaatggccccaaaataagtatacatttaggccattggagagataggggagactaccccaggtagtaaacccagaggggaccattaagtgggcctgtctgattgatactgggattagaaaggaaagttgaggcagattatggaggaaggactttgaattgcaaacaaaaagatgttgtgatgtcatggaaaaagccctggaattggaattgaatgatcctgagattatatcacagctctgcaacttactagctgtgtgacctaggtcagttggcttaacctttctgtgcttcagttttcctatccataaaacaggatgttgcagggatgtaactaagttctagaatgttgtaggtgcttaatcacaagccacaactgttgttagtgtgaagcatatgtggaggctaaaggtattttaatggagccttgacctccctaaagtagtgtttcagtggagaaagaagtacctttttttttttgttttttgagtcagagtctcactctgttgcccaggctagagtgctggtggtacgatctcggctcactgcaacctccacctcccaggttcaagtagttctcctgcctcagcctcctgagtagctgggattacaggcatgtgtcaccatgcccagctaatttttttgtatttttagcagagacggggtttcaccatgttggcctggctggtctcgaactcctggcctcaagtgagcctcccgtttcagcctcccaaagtgctgggattataggtgtgagtcaccatgcctggactaagaaatacctttacatacaccatcatcatcccatttgaggccaagagaccaaagcccaaagaaggtaaaagtattggccctaggattgggtatggaagctgctggcattgcaaggggtgtctaggaggagatgtgagtccagccagggctaggaaggcttgctcagcagggactctgccgaccctgagccagggagctgttgtgcagaattcctgaggaatatgagattttatttgcatgttatgcaaaacagggccacattttgccagaaagccactgttcagggcccttgccatcatctgtgccacccagcatctcaatgggcctttcctcttagcggggcacaggtgccagcaccctcagcaaccttttggtattgccaaggaggggctcaaggttgccagaaagagtgctaaactggcagttgaaggatctgggttcaagtcctcacttggccacttactagccatgagccttgagccagtcatgttccttttctgaggcctgagtttccccctctgttcaatgataatagtatcaatttcaaacaacatgatccgagttcaatgcaagaatgagtgtgaaaatgcttagctggggcttggcccacagtggggactcactaatgttgacaaattgttaaagtaaaattaatagagggagacccctgagttctaggccaggatgtgccaaatgtgtgtgaccttcaaaagtctcccaacttctccgagcctcagtttcctcagcatgaaatgaagaaattggcctggatcatctctagcctcttttccagctctactccccagcactctgggatgggaactatcagcgtaccttccctaagggcacacatacagtgttcagggtgtcaaggttggggagagacacagagcgtggatgcccttctgccctagggacctgtaggctttgcaaattaaatggtaagaggctccactatgacatcttggtgaaggaagaaggtcagtatgtgtgtatggggtgggggaagggtagagtactggatgcttgaaaaggggaccaggggatccatctgtcagtcatgtgtggtcgatctgtcagccaccaccatcgttcagacccctgttccaagaagagcactgggcacatggagtgctgcacacgtggcggtccgcattgagctacccacccaaggtgcgtgattcagatcccagctctgctctccagactcccagccccgctgggggcatgccaaggacaaatccttaccaccaaaagtaagtatggtctgtgccaaaaaccagagcagtatgtcctcaaaggggcttgggaacagtgtcatcaagatgggccacaatatcaggcaagggtggcaggtgggagctgctcctgagggatgagaaagttctcctcctggagggaaaaggaggcaggcaacacaagccggaagtcaaggctctgtgcagccagggaggggagagcgtgggagtcccaaggatgctgagccaggggggtgcacgcctgtgcctgtggaagttggagagtggagttgcaagcagaggctgaggaggaaggggaggagaaggaaatcagcttttgctcagggccgaacgcgtgccaggcactcttcatgaatcttctcacataaaccgcgcaccttccaggtatttttcctatgctcattctacagatgaggagctgagactcgcaaagaccaggaacaggtggcataggcagtggggagcagagccagggttagaagtggggtccagaaccccaggaccccctccccacctcgtctgctttgaagctcctcctaggcttccaggagaggaggattctttggcaagaggggaaggactaatgaagcgtcgctcctcttccaggcagccttcccagtcaggcagctcttctagtcagagagctccacggttcaaacagtgcagagtagctcagcttatcttatcgccacacaacccagggcaacatgattcaaccctgctgcttttggtgaaaggtctttcacagaaactctgctcatcacaaacatgggctcccttggctccctgttaggcagagtgtcttccctgcctccttgccttcagggtcagaacatatgacaggagggagactttgtcactatcactgccactgtggggagaggcttggtcagagcactgctgtgatttgtcaacagcacttaatctcttgggaaaataaactgaagctgaactctcttaaccctgagatttaagggaccctggagaagggctgcatctgcccactgctggccactgagaaatgacaatcgctactgtttatgaagtgtccacccagggcaggccctttgcatagtgtttctagtttgatgtttctagcatcaaatcttctctcttgactacatgtccagttttcccctgctttacagagagagaactgagaaacattgcattcaaagccagatctgtttgattccaaaactctgtgtttgctgaatgaatgaatacatgggtagataaggaatgaatggaatcaggttcagggacccaaagattggaagccagcattaatcttaccacctcctcctatctctagggcctcctcacaacattgagctaggtgaaatcagcttaaaataaataccaaacgaaagtttaaatagaaaacaaagagagaaagagtcctcaaaagagctgggcatgtgtcatctaaggacacaatcgacagaataaaaaggcaacctacagaatggaagaaaatatttgtaaaccatacgtctgagaaggggttaatatccagaatatataaagaactcttacaatccaacaacaacaaaaaacaagtaacccaatttaaaaattagcagacggtttcaatagacattctccaaagaagatatacaagtggacaagtatatgaaaagttgctcaacaccactaatcactaaggaaatgcaagtctaaaccacaacgaaatatcttctctgcaacattccaattttaatatgtgggctgccgaagcaagcacaaaaccacaatgaaacaccacacacccactaggatggctgctgttttaaaaaagacaaaacactcttcctaagccggcgctcggcaagttctcccaggagaaagccatgttcagttcgagcgccaagattgtgaagcccaatggcgagaagccggacgagttcgagtccggcatctcccaggctcttctggagctggagatgaactcggacctcaaggctcagctcagggagctgaatattacggcagctaaggaaattgaagttggtggtggtcagaaagctatcataatctttgttcccgttcctcaactgaaatctttccagaaaatccaagtccggctagtacgcgaattggagaaaaagttcagtgggaagcatgtcgtctttatcgctcagaggagaattctgcctaagccaactcgaaaaagccgtacaaaaaataagcaaaagcgtcccaggagccgtactctgacagctgtgcacgatgccatcctcgaggacttggtcttcccaagcgaaattgtggtcaagagaatccgcgtcaaactagatggcagccggctcataaaggctcatttggacaaagcacagcagaacaatgtggaacacaaggttgaaactttttctggtgtctataagaagctcacgggcaaggatgttaattttgaattcccagagtttcaattgtaaacaaaaatgactaaataaaaagtatatattcacagtaaaaaaaaaaaataatgagtattgttgaggctgtgaggaaatcggaacccttgtgcgctgttggtggaaatgtaagatggtgcagctgctgtggcaaactgcatggcatttccttaaaaaaaaaaaaacgaaacatagagctaccagatgatccagcaatactgcttcttggtatatatccaaaagaattgaaaggaaggtctcaaagagatatttgtacacccacgttcataacagggttattcacaatagccaaaaggtgaaagcaacccaaatgtctattgacagatgaacggataaacaaaatgtggtatatacatagaatgggatgttattcagccataaaaatgttgacacatacacaaaatagatgaatcttaaggacattatgctaagtgaaatacacctttcacaaaagacaaataaccatatgatttcatttctatgaggtactgagactagtcaaactcaaggaaacataaagtaaaaaagtagttgccagggactgggggaaggaggaaatgagttgtttaatgagtatagagtttcagttttgcaaaatgaaaagttctgaagttggttgcacagcagtgtacatatacttagcagcactgagctgtacactgaaaaaggtttcaggtggtcattaaaatgtgtgttttatcacaatgtttaaagagagctgggcctggagacttagaaggagaaagaatgggccttgctacttggtgatgcaagaaggtggttcttggactgattgtgtataaatgagcctcggatctcttttaggatcagaatactccctgggtccctgcccagcctccaacagggctggctctggaagggttactccctatctcctcatcacggtcttgatggtaatgaaaatccattcacttctctgcctggtggtctgaccaatggcccctatatgtccggcctgaagctccggggactagctccagaacatgctggaaggagggcttggctctctggcgtaaaccttacaaattatcttatgggcatcccatccacccatctacccacccatccagccatccattctttcaacacgtacttgttgagtaccagctctgtgccaggtccgtccagacagtctgtgcccggagggagcctgtagtcttgtgggggacagagatgggttatcaggagaatgcaatgcagcgtgacatgtgttttgatatctagggcactttgcaggggtcctgatcctgtctgtgatgagagttcacaaagaaagttcggtcttagggcttgaaaggtaaacaagactgaaccagtagggtaaggaggaggagtcagggagaatatgcttaggagaagcaagagcgtgggaactgcctggagattttacaaactgcaggacccaactgaggatctgaaaacaattgagtctggcatattgttgactgcaggcaggagtggtgagggctgaggcgaaagaggaaagggagaactggatcttatagggacatttaggcaccttttgagcacctcgcgagttgcagaggggggtggatttgaacacgtataaaacaaattttgtggctgggcacagtggctcatgcctataatcccagcactttgggaggctgagacgggcggatcataaggtcaggagattgggaccatcctggccaacatggtgaaacccggtctctactaaaaatacaaaaaattagctgggcgtggtggcacgcatctgtagtcccagctactcgggaggctggggcaggagaatcacttgaacccaggaggaggaggttgcagtgagccgagatcgcgccactgcactccagcctgggcgacagagcaagactctgtctcaaaacaaaacaaaacaaaacaaacaaacaaaaaatttgtggacccagttggagaggcaatggaagatgaggggagtggtcagagcacctggagtcggatttggggtctgggattctcagagctgtaaacacgatgcccaacccccgagtccaccgttccccagggcatgccagccacccaggaggggcacttcttttcgagggagggtggtcttcttgaaaacagcccaggtgcctccctagcccccctatcctgtgatcctgtctgtccttgagaacatcccttcttcttcaatcaaggatttgatgactgtccctgcccacaccctatcttctctcctctaggctgggcagtctcaggtcttagaaatcattcctgatgctccctaatatgtccagccatcctggctttctaggatccctggagttgtgcccctgtgggccccaggcccagcctgcacaatgctgggttgcctcaacggcccctgtcttaaggcctgcctcacatgttcagatataaacttcctaaaagccacctttgtgacccagccccagctctatctccagcttatcagccacctgcttctgaggacaagctggctcttgcaagccagagaccatttcctctcccccaaggacttgcagccaatctccgatagccctgtccaggagaggcaatggacaaagtgcagggtaggtgtttcctggtagtgactccttcctgagatagtacagagacccatcacagggaaggccccagcaaagactgaagaagccagccaggcaactaccgtatgttactcacagttcattaggagccatgcaaaaaaccacagttatctgctgcattaattaaaggagaagggggtggggcaaaagggaatattgaataagacctggcagagtggggccctggccatgactcccaggcaaaggggaagtttttgtaatgaatatgacagctggagtcttcccgctggccttgggaattcatcactgctttgagatgaattcatcactgatggggcctggctgctggtgatgcaatagccccccagtgctgggcctcaaaaaagaatcaaagaaggtcccaaaagcctatgtcttagaagagggctgtagggggaagccagagggtctcagtaaaacattgagttttgtcccagctccatcaaaggagaccagagaatggagggctgagccaagggcacagccttcctggaaacaaatctgcattctctctgttactcacaaggtgtgtgactctagacgagtaacctcactgccctgagcctacatcacagaattggtatggagagttaggtaaactgggatgcagattttacacatggtgaagctgggcctggtttttttttttttttttttttttgtggctccttaaaagcctcaggccatgggagaggcttccaccaaggtgagatagaatcggggcattgtcctgagtgtctgaaaccctttgtctctccctgtccttcctggctcttgcttactttgccctgggcaggtggcaggccactgtgtgggagtgaaggagccatgcctgaaggggggctggggtggctagcctgtactctgttactgtagcatcccaccagcctggcctcgctccaggagccctcgaactggatccctctgacctctaggaccgccctgcagaaagcaccaggggcctttctctaaaagatccactggctccaggagtgtctcggtggcataacagcccaggccatgctatggtacacctaaaactatagttatcagctcttaatcctgtcccccgcaaatccacattccaaccacgcagaaccttctgttctctaaacgtccccacgcttctgcatctcttcccagactgtcttcgctgcctgaaacattctccctgataccccgcctccttatcctagcacacacggatcatcatactctgataacctcagaaacatgcattgaccttcaactgcgtgcagtcagggtgaggaggggtgagggcgccaggagactgagggtctggccagagataagacccacaatttcttccaaactacaacttgctccgttcaacatacatacacacacacacgcatgcacttgccaccctccaggccttcgttcactcttccctctccttgtgccccttcccctatcacctcgtgccaagtaagactgagctctcaagccttcgctcagatgccatctcttccaggagcccttgcctggtgcctttcacccagagcttctgccctggtttggacctccctcaggatacccataatgcatgtgtgaattctggctggctccatgtcctttggcctcagttcccccatctgttaaatggaatagtaacacctaacccatggtgtagttaccgagttgatgaagtacagtaactgacttgtactaagtgctgagcaaatgtcagtctttaccaccagcagcagcagcagcattttaatctctgtatctttagcactgagcacagggctgaatacataattggtactaaatacttgcttggtggagggatggatggatggatggttggatggatggatggatggatggatggatgatggataaatgagagatctagtatgtttccaaaataagagacaatctttgctggggggcgagggggctaggaagagcctgaaagaaactaaccttcatcgtacacctgccatgcatcaaagctcaacatatataagttgtctaatttgagcctcacaatagcaagatattactgcagaataaggaagtggctaattctgagaggttaagtcggtggatcagtgtcacacaagatgtagtcaggaccagggactttgatggtcctcgatacctggaaggaggaggaggaggacttgctccaggccttagctactgtcaatcttagactgaaaattcctagggcatctctgtgggcagggcagggccaccccacccaggctgtcacataaagtgctcagctgagaacctagctttggagaacagcagaaaggaaaggccgggccagcggaggtggcttgggggctgcctgtggagggtggctgggggactctccttccttctccagctcctccagcaccaccctcagcagcctccaagaacagaaggagttaacgctgggattaacttcttgaaggaacctgaagttttttaatccttgttctttcctccttccttctccctctcccttcctgatctttactccgcctgtgggtccctcctccttactctcacctccccaactccaaaaacactctgattgccagactgggtcaatggttaacactcaactggctttatataagcctgccacctgcctgcttggctgcatctttggtccttctgttacccagctcctggaggcagtggctgtagcagcccttgctgctccacaccatggccacctgctggcaggccctgtgggcctatcgctcctacctgatcgtgttcttcgtgcccattctcctgctgcctctgcccatcctcgtccccagtaaggtaaggacttggtgttctgagcacagataactccagggggcagaggagggactgtctgggccggggttgggcatccttaggatccagcataacttcctcactgcccctgccctggaagtgaggctatcgccccctgctcctcctgaggactgagggctaggaggtcaaaggggcttttgcttggcacccagttgtaggagcccagcgtgaattacttaggtgggtttgcaacctactgccctaggaaacaggaaaccagttccatcaacaagatgcaaggggggcagatggagctgatctacctactgtgtgcccacctagccctggactgggctccatggcggctgagatgggctggctgtggggaggggacggctgggtaagcagcagcagagtgaagagggttggaaggagaataggagaaagctggctgcaggcggtctgcatctttaagagcataaacaggaagagaaagagttcacctgtggattcaagggctaagtctgtggaggaggaggggtgggagttggaagaggggaccgctgcaggtagacagcacaaaaactgtgccctggatggagggggagctgggcacaaccaggcgtcactgcctcctcctccgcccccagcagaagtcataacttcatctctcattaaatcaagccgccaatgcctgccctgccctaggcacccagtaaccttttccaccatcttaagaggtcaggcctgactgtcccatttgacaaatggggaaggtgaggttaagtcacttagtcaaagtcccagggcagatccaagtttcatggaacttggatattatacacttttgggccccactctgtaagaaaaaggacacaaaagtattaatctgaaattagtttggggctttgggaagggtccagggggaaggccttgaagttcaatcttcagtcagtcggcctctggcaaatcacacagctgggaggttcagagctgggggtgtgatctggtgccaaagcatgtcttctctccaccctgctgcctcctgccccaccccacacccccagaactgcccatcaagccattttcttccttttgtcatagatagagaaattgagtcagacttttttgttcatggtatcccaaaggggtgagagactgggggtgatagtggcacagcccctgggcccctgacacctggtcagtaacaaggcccagctgacctttgagatgaccttcatctcaggccaaagccggtggcatctcagtgctagggacccatcagatgggttttccgacaggctggggcaagtgtgttaaccccaggagggaagccagacagggattttgatttcttcccaattcccctcgacctggggaagcacagcacagaaagattcagtaacttgcccaggtcacacaggaaatcctgagtcagtgctagaagccatgcctgttggtgagactgggatgtgttaggagcccctgtcttctgtgcaccgtatctggccctgctacctgcctctggctcacagatgctgccagccccatcctgactctggtcctgtctaggagaggccagcccctctcaaggactttgctcctgcaattgtcctctcactctcctacaagataaatatttcctctctgcctgatctcccccatccacatacggaggtgctgtaatatctctcatcttaaacaaacaagagctctctttcaaggccacgctccttccaggatagtgcctctttctctgctctctctcataacaggaagtctcaagacactgtctacaccacaagcgcactttctcttttgtcagctcccatctccaagactcagatcccatcaacttccttgtgaccaaaccctgggccaccctcacattcctcagtccctcggcagcatttgtcacagctgtcaccccgtctttgccgtgctgtcttctcttggctttggtgacaccttctcctggttcctgcccagccctgccccttcccacctttcctgactctgaggttccttctccatctgactctgaggttttccagggtccccacttcccctagctgatcttatgccatctcgtgctttaaaaagcatctctatgccaatgagttatcaatctgtaaccccagccctaaactctaaactggtattatccaatgaacaccagccatctccctaattgaatattttctttgtaagcaggataagcaggttacacttttccacgtccaaaccaaaacccttcctgcccttctccagttggcttaggcatcaagaaatgcttcaaccatctaccttgctgcaacagccaaaaactcgggggcattcttgattcttctccttccctcctttccacgtgcagcagaaggtcctgctcatttgataccccaaaatactctgaatggagtcactccccgccctcggatccactgtctccccggtcatttcccatgtgtcccactctgctcaaaaccctacattggccaggcgcagtggctcacacctataatcccagcactttgtgaggacgaggcgggagaattgcttgagcccaggagtttgagaccagcctgggcaacataatgagaccccaccttaatttgaaaaaacaaacaaacaaaaaaaccctacactggcttcctgtcaaacttaggataaaacctcttcaagcagccagaagtcaccaaggctcagccctggactccccaggctccctccccctgtgacccacctctcgctcactctcccccaccctcaccagctttctttctgctcctcacattgctctggactgctctcccagatacctccttcctgtttttaggtttcagcttaaatccacctccttagaaaagccttctctgaccaaccccagtcattcttggggaaaagccctgttcttttgtttatagggtgtttactctctgaaatcatctatttgcttattttttacttcctctctggcttcctgcactagaatgtcggctccgtgaggacagggactttgtcttgtcccatgcagaatccccagtgcctggcacaaagtagatgttcaaaaaatacttgttaggcctggcgcagtggctcacgcctataattctagcactttgggaggccaaggcaggtggatcacttgaggtcaggagtttgagaccagcctggccaacatgatgaaaccccgtctctataaaaaaaaacacaaaaattagccaagcatggtggtgcacacctgtaatcccagctactcgggaggctgaagcaggagaaacgcttgaacccaggaggaggaggttgcagtgagctgagatcacgccattgcactccagtctgggtgacagagcaagactctatctcaaaaaaaacaaataaaaaacacccaagttttttgttttttttttttttttttgagactgagtctcactctgtcacccaggctggagtgcagtggcacaatcttggctcactgcaagctccgcctcccaggttcatgccattctcctgccttagcctcccgagtagctgggactacagtcacctgccaccacgcccggctaatttttttgtatttttagtagagacggggtttcaccgtgttagccaggatggtcttgatctcctgacctcgtgatccgcccgccttggcctcccaaagtgctgggattacaggcgtgagccaccatgcccggccacccccaactttttgaatgaagaaaggaaggaatgtgcacacagtggatcctgacctgcatccctgttgaatctctactctctgtaatgagtccccaagcttagccccatggccctggcctccaaagggggaagaaggagccccagcctaggctcaaatttgtgcccataataataatattgacatttgttgagtatattttatgtgcttgacattatgccatgcacttcaaagcattgttagatcatttattcctttcaaaagcctatgtgtcgggctgggcatggtggctcatgcctgtaatcccagcactttgggaggcgggcgcccaaggtgggcagatcacctgaggtcaggagttcgagaccagcctggccaacatggtgaaactccatctctactaaaaatacaaaaattagccaggtgtggtggcgcatgcctgtaatcccagctactcgggaggctggggcaggagaatcgcttgaacccgggaggcggaggttgcagtgagctgagattgtgccactgcactccagcctaggagacagagcaaggctcagtctcaaaaaataaaaaaaaaaagcctatgtgttacatgaggttactactactatctccattttacagacatgtaaactgagggccagtgtggggaagcaatttgcttaaagtcccagctaggaaaaaagtttgaactggaacctggtgttggagtctctgcctgaggctccctgggaggccggtggtgcccccgctgtgacccacctctcaggccatcctttctcatgtccgtccagctgtcagtcagtcctcccaccatacttcagtccagcatatctgttgagctcttgctctgtgtcaggggttaccaaaaggaatacagatgttccattctcaagttgcttatagtctataggaggagacaggtgtttacaccacacaaaggttcagccagaaggctgcagagctcagaggagggagcaaattcttccaactgagtcaagggagaatctgaaggaggcaacatttgagttgggccttgaaggttggtggagttttaacagtcagaggcatcagcagaacaggtgaatggaaccacaggaggaaagatgtaggggccaggaatagtagggtgtgtttgaggggtggcaacagaaccttgaaatgctagtcactctctggtggtcccagcagatggggaacaggagggcctggggtcttcctgctctcccaaccctgcagccagacatggaaaccttacatccattcaaatgtattcatccaaccatgcattttgttagtgaacatagaactcagtactgtgtgacaagtactgtttgggtgtgttgggaagagaaagtgggaggagtggggagacatacaaaaagcagaaacaatgcagcaggctatgaccacagcctggggagggctgctctagatggggtcagggaaggcctcctgaggagggtgttccaacactctgggaggtcaaggtgggtggatcgcttgagttcaggagttcaagaccagcctgggcaacatggcaagaccctgtctcctcactaaaaaaattagccaggtgtggtggtgtgtgcctgtggccccacctacttgggaggctgaggcaggaggatcacttgagcccaggaggttgaggctgcagtgagccatatggtgccactgcactccagcctgggcaacagagcaagactcctatctcaaaaataaattctctatagtcagccaagcacagctctgggtaaagagccatccaggcagaacaagcagtaagtgcaaaggcctgcagatggggagagcttagcaaattgaagggattaagcaaggccagtgtggctttgggggctcgagtgaggccttaagaggcctcactagattgcttaagtcaagtttagagaagagggttgaggtcagccaatgtcagccctacaaggctacagggaggagtagggattttgtgctgtgagcattaaggggtgaataacttacgactcaggggttgttcagctagtaagttacagtcacaacacaaacacctcccaggacccaaaggcatctgtaaaaacagtctcctagtggctcaacattggccaggacagaattcagctgaagtcaatattgcatttattgtaaggccagaaggcagaatttcttaatctgaatcactggcccttttagaatgcataaacattacatgtgtttgaattttaaaatctgtgtaattaaggctgggagtggtggctcacacctgtaactcttgcactttgggaggccagtgcaggagggtggctcgagttcaggagttcaagacaaacttgggcaacgtagagagacttgtctccactaaagatcaaaaaagttggctgggcgcaatggctcatgcctgcaatcccagcactttgggaggccgaggcaggtggatcacctggagtcaggagttcgagaccagcctggccaagatggcgaaaccccatctctactaaaaatacaaaattagctgggcgtggtggcacatgcctgtaatcccagctactcgggaggctgaggcaggagattctcttgaacccaggaggcagagactgcaatgagccaagatcacgccactgcactccagcctgggcagcagagtgagactctgtctcaaaaaaaaaaaaaagggggggtcaaaaaaattagctgggcatggtggcgcgtgcctgtggtccctgttacttaggagaaccaaggtgggagaatcacttgagccagggaggtcaaggctgaagtgagcagtgatcatgccactgcactccagcatgggtgacagaacaaggccttgtcaaaaaaaaaatctgtgtagttaaaatactcttagtgcaagctgttcctgaacctcaaaggcagggacttggatgattcacttcgggcatgaaaactatacaaggaatttggacctctgttctgggccccacctctaccttttgagatttcttggccctcagctgagatagcagagtccagtgaacaaaacatggattttggagccaaacaggtgtgggttcaaatccattcagcagcgtgtactgccgtgtgacctgaccgagcctcttcaaaccctgccatctctaaggggtgttgtgaagatgagctgagatagcacacatatacgtagagtacctggcacctggggcttgataaacacttgctcccttcgccctctgcctcttatctgaattcctgggcccctggaaaacacagactggtctggagccctgtgtggatacctcacttcttctccattgctctgttcaaatgggctcttgtgcttaggagggcctcagatgttcccacctatagaacaggaaggaatgtctggtcacccaccagattggtgagctgtgtccctaggaatacctgcagctgtgtggaggtagtttttctagcctctgggatgcctggaaataggataagaagaaggacccagcctcaaaggccagggggatccctggcgtagagtccccaacttggattttgcccagattactaaatcgtgtccctgtttatcggcacctgctaggtgaaggccaggaatgggaaagtaagtcaccctcttcgacagtaaagtttcctggatgtaatccagcagcgaggctcagggctgtcacaaggatcaaattcgtagaggagcttgcattttgctctttagtgcatacaggcagggctggccctggcccaggctgtgatatcaggactcttctccccacttttgttttctccagcactcaaaaattcattgttccctttggcctcttaaaacagaagctgatgcaacaaagtcattcacatcaaggtgtgcaaatcaatgaaggacacttgaatgagaacaagcaaagggtaggaagagtcaccgccatcacgtgcaacttgaggcaggcatggggtgggaaagctttagaatggtcaaaagggaaggcttccagtgcatgctgttgggcacagggaagccataggcggctaactagaagcagcaccccaggtgactggttaggggagcacatttcgctttctgggcttggtcctgagttggaagtaggagtaaagagtttggggcaaaaatcaggggaattggcaatcatcgagcaaatcctgagtgtttagggcttactgctgtagaggttgtcgtttgacttctcggctggttattacagaagttgtgaaacatatttttacatatgaactggccattgtcccctttgtatattcagtcctcaaagaattaggcatttggcatctgcctattcttcctggaagagacttccatccctccacactctttcatgtttttgtttgtttgtgagatggagtctcactgtgttgccaggctggcctcaaattcctgggctcgagcaatcctcctgcctcagccttccatgtagccacacaccactggacccagcaccttttcatattttaatagctgtgtttatttatttgtttaggttttaaaagttaagggtttgtttgtttgtttgtttgtttgttttgagacagggtctcactctgtcacccaggctggagtgcaatggtgcaatctcagctcactgcaacctctgcctcccgggtggttccggtgattcccccacttcagcctcccaagtagctgggattacaggcacatgccaccatgcccagctaagtttttttgtttgtttgtttgtttgtttgtttgttttagtacttttagtagagacagtgtttcgccatgttgcccaggctggtttgaactcctgggctcaagaaatcctcctgcctcagcctcccaaagtgctgggattacaggtgtgagccaccgcacccagcctattacctgtatttcaataaaattggtttcctttgtagtcttatgtattttattggtgcatttaaaaacattattctaagacactggaatgcttcatcaggctgccaaggggatcctggtaccaaaaaaagtgtacaaacccctacatcagaaatttccctgaatgcatacaaacacttgcacacaaattttttaaaccgcgtgtggtagtatctgtgtaatattttattaaaccacaagtctgaccatgccactctctctctgcttaaaactctttgaggccttctctctttttctcccgtcttccagacaaattcctagatcctctcagggcagacaaggctctttccaagaatgcatcttgatcttttatgtctcattctgttctacatttactccctcaccccaaccccctttgcccactaactgaactcctactcacccctcagtacccgctcaaggttccctctctggaagccttcctcaacccaaacaaaaggaggctcagggacggggccccttctcctctgagcgccattcttctggactctgctttacaggtgcttggcaggctgccacccagtgcctcgccttgctcctgagacccgggagtgctcctgccggcagcatgtccacttgctaggggcagaggggcagtgggagtgtcccccatgtgccagcctgtccccacccttgggttaaccttcagtcaccaggaggaataaggtgtgacacctctgagactgtgggcacatgtgctgctgcctgacagtcacaggctgtactgtgccagtgacagaggccatgatgcccacaggtcccacacctgccacacaccccgggtccggagtctgccctggactccttggcaccttcacttccatttgtgcctcatgtaacctctctggttctccagaagcccaggagcacatttctctcccagcaccaaccctgctatgggctcacaggctacaatgctttaaaacttattcctggctgggcacggtggctcacacctataatcccagtgttctggaaggctgaggagagaggattgcttgagcccaggagttcaaggccagcctggacaatatagcgagaccctcatctctacaaaaaaaaaaaaattgttttaattagctgggtgtggtggcacatgcctatagtcccagatactcaggaggctgaggcaggaggattacttgaggccaggagatcgaggctgcagtgagctgtgatcacatcactgcactccagtctgggcaacagagtgagaccctgtctcttaaaaaaaattttttttaaaaaaaccttattcctacatttgttagctctcttcgtccttacagtagcccagttaggtggatgtttctgttatccccatttccagatgaggaaactgcataatggagataaatgtgtttacagcagcgaatgcttgatgtttcttaccagaaaagctgagagaggttaagtaacttgcccaaggacacacagcagtaaagcggggactcagcactcagcatgtgccctggacatgtgctttcccactacagaagaagcaagctgcctggcttagggtttggaagcccctctgggggtttctgtcttcagtctgcccttcaggccagcccacacaggcactcagactccccgagggccagcgctgggcctgactgatgcctgtacccctagggcccacgttcattcacccactcattcagtgtcaactctgctaaatagatgccaggcacctcgctggggtgagcagaaacagacttgcaccctgctccctggagggtagagtctgacaacaaagattgatactcatcttttagtccctaaaactaaatgtttaattgcagactatgatgagtgctatgcagaagaggtacagggacttagagtgtgaaaaatgggaactatatcccctcctggaagccagcctgaaaaatcaatatttgagctgagatctcaagaaccagtagatatcaactacgcaaagtagggagggaagagaggtccagagagaggaaatcgtgtgcagaggccctgtggccagagggaggatgcagtatttgaggaacccacagagggctggtatggccagagcagagagagtaagggggagagtgttaagacatgaggcacagaccaactctaaacttaggttcctgaaagcactaggaagccactgaagagatgtgagctgttttgagatgagtgtgtgtgtgtgctgggggaggggaggtgcaaattaaacagatttgtgccttgagatcactctggctgcagcaaggagaaaggatttcagggtcaagagaggaagctgggagatgaataaggaggcttttgcagaggtcttgctgagacttggaccaggctagtggtccagagctacagagaaataaatgggagcactcaaggggcagaaccagcaggactgggtgcatggcccagagagggtatttgtggaatgagtggctgatgaacaggcaggagacccagggtctgcctgaagtgggcttccagtcacaaggattgactgctgggtggagaagagtgaggatctgaacagggtgacttccttgggggtgggggtgacaccagtgggaaaggaggctttacagaccaggccagcacctgaaaaagagagacaggctagatcatagaggagaaagaggctacgcccccgtcctcaggagcccataaacagatcttgagaggagagtagctgctacagtcaaggaacagagctggggaacaaccaccctgctggcctggggaaggaggaggcagggccagaggtagaaagaagagcattcgccaccaggagaaaactcttccctgctggtttctgagctccaggaggggccaccagggactgtggtgcaggccatgccttgcacaactccatatgagaatggcgacctggacttgtgcagtgcagcagtcctggggagcagccagtggccagcgtgtaaaccagctgagtccaatgccataggctgtcagttgaacttggctggcctaggttccatagagctgggttgcaaggcagagagcactagagtgacctggaaggataaggctgatccccaaatccccacttctagagctgggaatactgaccttgtaattggatatactgtgtgcctaagaagaaaagacccctagggctctgccctcagggagtgcccgagagtacctgacccagggggcctctcagaacactgacagctcctcagtctcaaacccaaaccctctaagcatcaacaactgtcaacaaggcaaagctagacctctctgagtcttggttctgcccttttcagaaaattactttgaaatgcacaggccaggcacagtggctcacacctgtaatcccagcattttaggaggctgaggtgggaggatcacttgaaaccagcaattcgagaccagcctgggcaacaaagcaagaaccatctctacaaaagatacaaaaaaaaaaaaaattagctgggcgttgtgacacatgcctgtagtcccagctatttgggagtctgaggcaagagaattgcctgtgcccagcactggaggctgcagtcagccttgatcacatcatgaactccagtctgggcaacaaagcaaaaccctgtctttaaaaaaaattttttttaattagaaaaaataagaaataaaatatacaaaataaaatgcatgggattacaaataaaccaattattttgaaatacaggtatcaaaatatggaaaaataaattgcagctcagaaatagatgtacttccttgctagtacattaggtaagatctaaagttggtataataactaccaaaatttcaaaataatgatggaggtaaacagaatgtcgagagctattctgaaacaactgcaacaacttatctggatcggtgtctaatagctgatagccacagtcaaatatctgtgaccaagtcaccaataatgccattaatagcactatgattttatgttcataaccttagttcgatgttcttgaatagataaaatagttttcccatttatcttcatggattctcagaactccatgccccagttaagaatctcatgatgcaggaagaacaaatcagcgaattgtgctccagcttgacaggctgcctaggaggtgggatggggaggcagggccaaagccacccggggttaatgaaggcttctggatggaacttcggaacaggtcttgtgttttgatctgagactgaggacaccctcaaatgcaagatgtttaaagggtttgagactgaggagctgtcagtgttctgagaggccccctgggtcaggtactctcgggcactccctgagggcagagccctagggagatagagaggaacccatcacagacataggcagcagggagcagggagccatgcatcaaacacactggaacacatggaggcgagtctgacttttttttttttttttttttgatacaaggtctcactccagttgcccagactggagtagtgcagtggcgtgatctcagctcactccagcctcaacctcctgggctcaggtgattttgccacctcagcctcccaagtagctgggactacaggtgctcaccaccacaaccagctaattcttgtatttttagtagagactgggttttgccatgttgcccaggctggtctcaaactcctttactcaagtgatcagccccccacggcctcccagagtgctgggattacaggcgtgagccgccatgcccagcctggtccgattattaacaactccctttggagtatggaaacagggtctcaaagtgacatgcttaacagagcccagccacaggaagtggcaggccctggggaagatagctctggattcagagccccagctcattctccctacactccactggtcacagggagcctgaggctgaggacaccctcaaatgcaagtgatcatgctcagggtagcaggtgaaagctggggcccgggaagcagatgtcctggcttctccacttactatatgtgtgactttgaggcatttttgaaatgtatttactcctttcttttttcagctgtgaaatgtgaacaatagttattacctctgagagcaaataaatgcaacttgtaaaagcatttgaagcacatagaatatgacgcctggcacaaagtcatcctccaatacttatacagaaacttcttcctgaatcagcagagtgagcgcaaccccagccctgctccttgtctctggccagagagttctgggtggacagggtggaggacaccagggtccaggagggctggcccacccttagtccaaggggagggtaactggccattcagtcattgcgggtgaggaaacactggcatcagcagaatcctgctgggggaggagggggctgggtttctctgtctgagggtcaaagtggccccaatcctggggctgatgagtttgtctccaggatgaagagaggtagtagaggtttggtggaaagagagcttggcttcggacagatttggtggggctatgtgcagttgggcaggctacacactgcacaattactggggcaccattcacacagactacaaggggagtgctcttaggtagtgcttgaaagttacccaatcccaatcctttatctgagttccatccaggctctgccacttttttttaatagttctgtgaccctgagcaagctgtttaccctctgagctcatctataaggtgggacccccacacccactttaatggctgttatgttttcatgtaaacacaaaaatgacaatactaagttcctaagagttgctgaataaatagcagctgcctcttcccccaggccaccgcctactcccacctcagggacccttcccaagctttagggtactaagagtgtgagcttagcctgtacgaggtggagaggacaaggacagggcaactgggatgggcaagggaggagggggtccccagccccattgtccaacaaaccccagcatgcggccccttcccttggcaaataaagagtgggcaggtgcccggcccctggagaggggatacgggtgccctctcctggctaatgattccccagccctgggaagcctcctggctaatgattccccagccctgggagaggctctataaggggggtgggcctccattcttgccccaggtccccttccaggcctgaggtcaggcttctctagacttgggggcttcatgcaggaaagagggacttctggtactcaaagactcacaagactcagcattgccccacaattccctgcacaacacaagcatcttgggggaaacttcacatagcctataaatgtaaattgctcctctggagttgtgtaatgcagcagccagaccaggattgctagaaaggatgccacaaaaccgactctgtctgatggagagctcactcctagcaaagggaacaaacactaaatatccaacaaacaaacatactcttgcagcttgtgataaaagccagggaacgccagggtgccaggcaaaggtccacattgcccaggtcctgctccttcttctggcagcccccatctcatcttgggatcctcagctgggcccctgcaatcccactgggctggatggggactggtaaccaactccagactctccgaagtggctggcttgtaatgtctgggctccccagggtcaaagacaaggtgatattgagtgccttgctttgctttttatttgcattttgaaatgagaccttgggcttgggaatcaatgactgtgggtttcacaggctctccccaggcagtcacaaatggcctggtttgtctgacagacaggaggtggcatagctctgggacacaggccctctgacagctctgccgcttctctcccacctgcaggaggcctactgcgcgtatgccatcatcctcatggcgctcttctggtgcactgaggccctgcccctggccgtcactgccctcttccccttaatcctgttccctatgatgggcatcgtggatgcctctgaggtgagccccatccataggagaaagcgttctgggcagtgcgggaggccagggggtgggttccctcagcccttgttgacaaaggaagcctcaccataggcagggcacatggattaggggttcctgactctgcatgaggaagaagtcagctagaaggctgcgggctggggtggggaggggtgcagaattagtgctgcgagttcattcaaggtgagagtgattagccagccgtaggtgggaggtggaaggcctagtgacacagaaaaggggccttgagggccagctaacacactcatatacttctagttcagtggctcttgaacttgaacagcatcggagtcacctggagggctggttaaaacacaaatggctgggtccagagtttctgattcggtagatctggggtagggcctaagcattttatttctaacaagttccagttggtggtgatgatgctggcccagggatcatactttgagaaccactgtctagtttttagaaaccgcactaaagtatctatctcccagtccatggcttgaaacatgaatggaatcacggtagattatctcccaactaattattcctgaggggagataaagtgagtttgacaagaagaggggaacctggttgatattaaatgatagataatccaggccgggtgtggtggctcatgcctgtaatcctagcactttagggggccaaggcgggtggatcacttgagctcaggagttcgagaccagcctggccagcgaggtgaaacctcatctctacaaaaaatacaaaaattagccaggcatggtggtgcgtgcctgtagtcccagctacttgggaggctgaggtgggaggatggtttgagccaaggaggtggaggttgcagtgagctgtgattgtgccactgcattccagcctgggcaacagagccagaccctgtctccaaaaagttaaatttattttttttaaatggcagatcattcagagaccatttccatccagtttcgagagcccaggggaatgccagtctgtgggaatgtcagtgactgcatcccataacctcgggggcaccgtgggagactccagggtcttcccgccgctcagccatgtctccacctgccaggttgccgtcgagtatcttaaggactccaacctcctgttcttcggggggctgctggtggccatcgcggtggaacactggaacctgcataaacgcatcgccctccgtgtcctcctcatcgttggggtgcggcctgccccgtgagttcctcctgcaaaccagcacgggagaacctgacgaggagatattctgggcacccagtccctgaagggaagctggaacagcagtgtgtctgtctgcccatccctaggctaatcctgggcttcatgctggtcacggccttcctgtccatgtggatcagcaacacggccacctcagccatgatggtgcccatcgcacatgccgtcctggaccagctgcacagctcgcaagccagcagcaacgtcgaggagggcagcaacaaccccaccttcgagctccaggaaccaagtccccagaaggaggtgaccaagcttggtgagaaaaatgaggctagactctgccccaaccccttggttcttggagagagtctgagggtctgtccgtttcgagggctggtcatcttggagcctttggggagagaagaaagagatgcaagaaggacagtgaccaatttgtttttccttttttaaaaaatgtcaagtaccctgttttgggaatcccctcatccctgggcaaaccaagatgcttggtcaccatagcaagaagagagctggagtctaggtgaacagtccaaggtctaggctccattcttcctgagtggtttgggtaatcctcgtttccctctctcaagagagaggtcagatcatagagtgtccaagggtgctcccagcctgagactctggggaatgctgggcccctcaggcctggagacatcctctgtcctccttccagccccggtctgggctgttcacagacaaggtaccctggagggccttgcagccctggccccgttccccagagctggccctgtacctgcccccacctgggctctcccttgttcccagataatgggcaggccctccctgtcacgtctgcctcttcggaggggagggcacatctcagccagaagcatctccacctcacccagtgcatgagcctgtgcgtgtgctactccgccagcatcgggggcatcgccacgctgactggcaccgcacccaacctggtgctgcaaggccagatcaactcgtgagtgacaaggggtgggccaccttgggggatctgcacattcactgggaggtgaatggggctgggcagttctcggggcaatgtcacacggcagcccatgttcctccttcaggctcttcccccaaaacggcaacgtggtgaacttcgcctcctggttcagcttcgccttccccaccatggtcatcttgctgctgctggcctggttgtggctgcagatcctcttcctgggcttcaagtaagtggcaaagttggtgagagaagcccaggtccctgcccttagccctgggagcttccagttgggtgcagatgtggaaaatgatattatcaccatcccaatgagaaggcttctccctcccaaagcccctctgtgcacttggacccccatttgaggaaattactgggtagagagtattatcccatttcacagatgcgcaaattgaggcttcaggagtggttcgcaactagatttgtcagtgctggggctgcaaaccaggtcacttgatgccccttcccataatggtccaccgtcctttgataggtgcttaaggggcacacactgagcatggttagttacagaagcacctgctgtgttcctactgtatactgggttgtgtgtaaggcactgagaatactagaaggcactgggcacagtccctgtccttgtagcccatcaggtggatgatgatatggtggggtcacgacagagggaagcccagatgctgcaagagcacagagaacacagtgtctagttcagcccaggtgagtgaagattccagaacaccatggaggagatcatgcctgggctgaatcttgcaggactagaagtcagccaggtagagaatgggtgaagaaattccaggcagcaggagcagattgcacaaagcacagaggcaagacaagacgtgttcgagggaactctagttctgcaggactaaaacacaaacagcaaaaaggagcatcaggtcatgaagctggagaagtaggcaggggaaggttctggaagctcttgtgtgccacctaatgaagccaagagtaataaatagatttcattcctacttccaccaggttcctggtagtcactgtttggagctctgagttggaaaatcataggagaccctgctaaggctcagttagtatcaagtctgtgattgattagtgatgtctgccatgaatacgggataagagtggtggtatgagtgttactgtggtattaattataatttgcccttcctgcccaggcagtggagagcccttgaaagtttttaagcattgctgctgcactttggaaaaatcacttgggcaaatgtaaggaagctggattaaggttgggagctggtacaaggcaaggtggtagtagaagaggtcagcacagtgccaggcaccacaggggagtcaaagatgtgtgaagtgtggtctttgcccttgaggaactcacagtccagcagggaggttgagatttacccaagtggaaagttaaatgtcaacacaagttaagtcagcagcagaaggaagtgggctgcagcctactgtgcctctgaggacaatgcaggtggggctcaggctggcaggggataagcagagaaggcagaggagggaagggaggacttcccgaaggctgttggaggagaagagctgtgagccagggcaggaagaagtcccagggtctgagctgctaggtcctcctcaccctgggcaagggagggttcagcaccatagaacccctggaggaaaaggggctcaatggggcagggccaagcatggagaataagcaagaactatggcctctaaaagtcttctgctcctcctccagaacctcaggcggagctggggcctgagtgtagtgaccctgagatgccctctgtgggcctcagcctttagatggtaggcactcagagccccttgctccctgctggagcaggccccccacgagctgccccgtccctctgcctgcagcttccggaagaactttggcattggggaaaagatgcaggagcaacagcaggcagcctactgcgtcatccagaccgagcacaggctgctgggccccatgacctttgcagaaaaggccatcagcatcctattcgtcatcctggtgctgctctggttcacccgggagccgggcttttttcttggctggggcaatttggcttttcccaatgccaagggggagaggtgagagttgcaggggttgggaggaggacacatctggggctcacatgctcgggaaggagggaagggtatagggcccccattgcagaacaggaggtaacacttggtgggggatgaaggttccccaggcttgtctatgggagaggctcatctccaccaccctccaccctgtggccctgagcaaccccaagcggctaacccagccctccccgcgccccctccaccaacagcatggtgtccgatgggacagtggccatcttcatcggcataattatgttcatcataccctccaagttcccagggctgacccaggacccaggtaagcacctggactggggcagggaagggtctccgggcagcccctgccttcaagtatgtaatgtaccttccaccacacttggcaggagtaggcaaagcccagaaaggctggagcgacttgccaagggcacagggactcggagacaaagttgagatgttgcagaactgagggtcccctcctgcacgcgttaagctccaaaagggacccacacagggagcccgcaaatggagaggggaaaggcctgtttgttctttggtgacccatccttctctgcttgggaagtagaaaacccagggaagctgaaggcccctcttggcctcctcgactggaagacggtgaaccagaagatgccgtggaatatcgtgttattgctgggtggtggctatgccctggccaagggcagtgaggtgagaggcccccagccccctcctcagcctgtgtgagggtgtctctgtggcagggagagagggggccctgcttctgtcccacagaggggagacctggtccccacgtaggagcctctcgggtaggcagagcctttgcagcagctgggaagacttaggttagagccctcatgtgggaggaagaaacacaagccctagggacctctttgttcagttctcaaagtccaagggaaggcaggattctctggtgggcagagcctgttctcagagacaaatgccatcccaccccagccctttgcccgctgccagagcacacagtagcatcagcaccaaagtaattgggggttgtgttgacgcggtctgccctccgcagccaccagggggcaccatgatcacacccacccaggctctggggaccagaacatctttccccagagcctccatccaaaagagggaaatccctgacacggcatccctgggcctccgtgttctggctcaaacagaaggtggctgcccaggtcagggatcggtgcaggggactcctgggtctgtggcatgttcatccactgactgtgcccagtcctgtgctaggcgctggccccactgagcgagattaagtcccaccttacagcctggcattccagacgtgggaaggcaagacctcggagctcttctgaccctgtggactgtccctgtcctcccattagcctcttgcagcctctgtcagggtcctcccccaactttccctccctgccaggagcaaggttccctctgccccaagccactggactggaaggggcaggaagagggctaaggttgtccagggacctcctgagagaggtcaggaaggcaggagtcagtgcggtcaaagatttttgctcccaccaagccccaaatttcccaagaaggccctttggccccctcctaatttctcatctgccccttcttcccacacccagctgttcttcaagagcaggaaagggcaccccttggtcttagctgggtcctatcatccctttagagctgtctttgactctgaataccagggagatgttagcaggagcaggagcctcatagagcctcggcagaagacttgggggcccaggcagccttgcctctcacatgccatcctcctctgcccacagcgatcgggcctgtcagagtggctgggaaacaagctgaccccactgcagagtgtgccagctccagccattgccatcatcctctccctcctggtggccaccttcaccgagtgcactagcaacgtggccaccactacgatcttcctgcccatcctagcctccatggtgagctggccctcagaaacacctcctccaggcagcccgcctgcctgccccaccaggggttctgcctgctgggcagagtatcctgtctttgcacctcctcttttccttttcctgaagaggacccctgagtttccatccttctccaggctcttgagccaccttgggccccaaggcgctttggcccctgactcaccccgtccctcatgatgtcacccctggagtatcctgatggggatcctggtggcctcacccacctccccaccccagtccctgttctggtcattcctgaggtgacggggtgaaattgctccccgaagcgtcccaagccccttcctccccaggcgtgttcctgcagcctttgatgacacccccggagcccctttgagatcagttttatgggcccctcccctcaccacaccccacaaggcagggcagcacactcattccctccagagaggtcaagaggcccttccaggtcacccagtgccttctgggagaagaggtgggctcatgaccagagagtgtattagggtacaggggttgttccccagagaagcaggagaattgggggccatgcccctccctctggcttggggaccaagttcagctctgcgccactgcctcccactccaggcccaggccatctgcctccaccctctctacgtcatgctcccctgcactctggccacctccctggccttcatgttgcctgtggccaccccgcccaatgccatcgtcttctctttcggggacctcaaagtgttggatatggtaagtggcagggaggcctgaatgcctcatccctccttcctgctctgacttttcatcttagtgaaccacaaagcagcttaaagccactgagagtctcagagttgagcgggtcctcatctggaatgaaggtgcagttggggaggttgggacatgacctctcagtggtggcatcttcaggccctgccagccccaggctatgtgagagggagggaagtgggtggggaacatggggaaggctccaaggtgccaggcacccacactcagggagatgagctcagagagaacaagcccagggccctggaagctcaggaggagcgcccctttcccctgttagcacagggagtaaagcaaggggcaaaggcattggctatgctgcaggttagaccaacgggaggacttcccagagagaattttgctggtaggagggctcctgtgcacccccaaacacctggggacttgggggcagtccagcccagtccctgcttagccaaatggactctcctcacaccaggcccgggcaggattcctcctcaacatcattggagtcctgatcatcgcactggccatcaacagctggggcatccccctcttcagcctgcactctttcccctcctgggcacagtccaacaccacagcccagtgcctgccaagcctggccaacaccaccacaccaagcccctaggctggggcacagcctggccatgcccaggaagacccaccccattcccactcctctgagcccggaggggacaccccaagctccaagctccaagctccaggccaaaggctgaaaggcacgtgtgtacataatctcttgcgtgtctgtaaggaaggggtgtatgctcagtttcctatgtgctggaataaaaggtgtgtgcatgtgtgtgtgcgcatatgtgtgcgcctgcatggatgtgaggggtgtgtgacgtgaggctatctgaggggggctgtgtgcatgcacatgatcctaggtatgtatgttggacagtgcacacgtgtgtgttcacagacaatacaacatgccctctctggtgccccaggtcttggtatccccagcttagtgaccagacttacttgcactgtatttattgaaattcaggcttggagtggcctgggaggagggcctgccagcagctgccacgggaacagcctctgggctgttaaagtcacattaaagtctttttcagtaaagtctgggatggtttttcatggcactctccagggctagtccccaatgtggttcagaccccaggttgggggagtccagaaggagggggcctggcctttgtcctatatgcagcccccttggcacccctcccacccaggggggaaggtaatggccgggcatccctgccaaggcccatcagagtgggcgcagccacctaggagagcagcactgacatcactgggcctggctaattgggagctgccagtccctgcgtgtctttgggaaaaccagcttccccgttcccagagcactccctgggtatttacataaaaccctctgcccctgccaattcctcatcgacccttcctccagctggaaaaaccggtcccaccaggccagagaaggcaggctgacctgtgctgggtgcccagaggaccgaccctcatcctgcagcacagcaacaggctggaaactggcatggccttcagagtccaggaccagaaaactttggatgattccgcctcccccaccccacctccacccggcctccccacactcccccaccccacatcctcatggactccagagttttcatttatctagcaaggtgggggtggggatggggaagaatgacaccgtatccatcgttccatctgcgagccaaacagcccttccctgctggaagttcatctttgtgttgatgctaagtctcgcccactgtggacagtggcgtgtcagccttgagttcatccagaaggaagcttcctagagtctcaccccatcccctcctcctccagtgggacagaaaagagatatttctcatcaccttcatgcccaaatgaaaaagggggctgggctgtgaagagagaaaaccagaaaggatttccttctggatccccctgggccgggctttcactgggtcctcccagagctgggggttggaagtgcagttaggagggggcactgcgtgggggagtacgtggctgtccccaggggacagggggtcctgacaggacacgccaggcatcccagagagccaggagtgtcaggcgggtggctccagccccaccctggtcccccaggctggcattcctcactcatgaagcacagccataaatcacagctcccactcagacccacaggaggaccccctcccacccaccaaagccccaggcaacagtcccctgcattggaaacggctggccccagaatgttggggctcccccagtggcctacccacaatgcagtggctccctaaggagcagcccagctccatctgcaaggaggaccctctgctgccacttccttctggaccctggctggggaaaaggagagtgtgcttctcagggtgcacatgccctgcccactgttctcggcacacttccccctcagtccggctcagagagggtcaggtgtggactgagatcacacagcagtcccagaaagtgagcacccggttggccctgcattctccaggaaggaggtggacgccagccagcctgagggtcgacagtttggctgcggtggatgccctggcagagctctggggccaagcctcccctaggtgctcagaaaacaccctctttagcaggcaggagggtggacaggcagcaggtggcacctgtcggcctaatcaccatcattaactgggcaataaagcggcacggcctgggctagtctttgaaggaagggcccgccagccaggtcaggtttacacaggcagcccggcagctcggctccacacacactccaggctgcggcaggtagatgggccctgctgggactgagtctgcagcctcgctgcccaggcacccacaccccatcattgatggcttctaggaagttagcagtgagctttgggtgtctcctaccagctggacttgtgcggtgctgggactcaacaacttctgcggtagtgagcatcccattgctaagatcaacaagtctggaagtgacttgaggacagtctgcctgattcgagctgtgtccccagttcctccacagggcctggcacagcaaatagtgcatgaaggaggaatgtgtgggaactatacgggagcttcttgctcccagagggaagctggacacgctcccctccaagcctctttccagactgccgtgtgtggagtgctgtgtgactttgagaaatatcttgacctctctgggccaatgtcaccttaagctcagcagataggcccagatttctgagccgacccatagtgttcccctgaccctgtcccctgaggtcctgggagtgtccctgtttccctactccctcctcctgccagccagcaccagccctctatggcaaccacagggcccagggataggtggagcttgttagggagcttgtggaggcaggagcagggctgtccacaccactctctgagttcacctggacctgggccccggccaaagtgcgctctagaggttaaggtcattggccccagagtaggctccttgggggcgcaggccatgacttcctatctcctcacagtcttggaggggaggctgctttctgaaggagggagggaagggtggaggaagctagggagtgttgggtcaggggtcgagtagaactgggtgggtgaagttctggtggagtaccagtctccaaccctgcagcctccaccccagtttggcaagggaaggggaagggggtgtgcagaggagaaggcaaggaagggaacagagcagcctagttggaaagaatgtgacggggactcagaagagtgctctgaagggtggaaagacccacaaatgtgtgtacgtggagtcacagatccttgggtacccacagaacccatagacacatgcacagacatggatacccgggaacacacagttacacacattcacacacaaacactcatgcatacaacattacaggctctcacagcctgaaagacacacaggaccacccccagaaacacacacagacatacacagccacagccacctgtacacacacagtcgctcagacgcctccgcaccccgtgtcagacctgagtgttctcgctgcatgtggctacccacatttagacacagattctggcacggacatacccagtagcacattacagctccacagacttcaggcgcacccatggtgacacgtgaaagtgagaacacaaatgtaaatacgtacacactcatgcagaggtacacatgtacttacacagacactgacaccagtgaaaacacacacaccccagcattgcttctcccacctccacagcaggagggattaagacaagaggtgagaagccctccccacccagcaggactctgtgttcctcccccaccgacccccccaccaagctctcagattggaaactccctggatttcccagggggtcagccaaccagaacaggctcagacctcggcccagctgccccgccacacgccctccacagctctgggtgcttctccatcagccacagccaatgagctgtctgctcttccccaggaagctcaccctaattaaccccagatctccccaccccttctttgacatgtggtccctgggcctcagggcctcatggcagctttgcttgggccctgttcctctgtggatgttcttcagtgtcttgcacaccagtggagtgagacttggaaagcagcaggctcaaatcttgggaactcactttggaaaagcaagtccagcctgcatgagcggaagcagacagaagatggccaatccagatgcagggttcaggaaggggtccccctcctccatcacattggggctcccaagggtgggcacatgctcttccttcttcctagcgtccctagggtctttccccagactgaagcatagcagacatgggccccagggatttccatccccagccagggctgttttctggcccaaagcagcccagccctgggcacagctcagcagcatacagtgaactgcttctgacctccagtattcagagggacagagctttctctggccccagcctgtctaagcatctagctgcagctcctccaggccagagcccagctcagctccatctgaggacctgaaatgagggtgctggagtgtgtgggaccaaaactccagacaaaagtcctttcccaatactgcagcagctggagttgaggctagacaccaggacagactttctgggcctaagagagaattctggagggctggtgtgatgagagaaggaggggatggtcctatctagagacagaggagaaacacctcacaaatcccctttcagtccaaggactgtggcaatcccaaggttcctgtttcaactcccagactgcatgcaatgaggaagtcatgcttcccaaaggaaagagggagccagagccagagcctacacccattcctggggcagaggtggatcctgatttggaagagaaagaagttcatctcacccgccagaagcagtctcactgtgggaggtgataactacagtctctcctgggcatcccatcagggcctccctgagacccttggcccctgaattaatttgcattttcttgatttttaatgaagttgaaaatcgtttcacttgtgtcttggccgtttgtattttacctgtgaattgcttgtgtcctttgcccatttttctgtgaaatcatctttttatttatttagaggagctccttatatattgtggctattaactctctatctgttacatatgtttcaacactttcttccaggctatgttatgtcttttaactttgttcatgttacattttgctctaaagaaatttacagtttttatttagtcaaatctgtcaatgtattcctttatggcttctgcatttgatgtcatgtttaaaaatgcctttctccactccataatcataaaaatatttcctatattttttctatttgtttgtatgattttcatttttacattagattgttaatccatctagattttttaatgtacagtgtgaagtaggatttaactttatttctttccaatggaaagttcattgccccaactccatttattaaattttttacttgctactttaaaatactttacagtccagatgtcgtggctcaagcttataataccagtgctttgggagtttgagaccagcctgggcaacagagcaacaccccatctctacaaaaaaaaattcttttttaactaactgagcatggtataactgtagtcccagctactggggaggctgaagtgagaggatcacttgagtccaggaggtggaggctgcagtgagctatgatcttgccactgcactccagcctgggcaacagagcgagaccctgtctcagaaaaataaagtaaaataccctactattatatatctattttaaaataccttgttatcatattcccatttctcacaaatatccaagtttattctggactctattatcttccattaatttatttatttctgtatcaaagttgcagctttaattatggaagccttattgaacattttgaaaactggcagggaaagttacctctgttagtcttctttctcaaaaagctccaagctattctcatgtatttacccttcccccaaactatagaatcaactcgtcaagtttagggggcaaaaaatcctttagacttttgatttgaattacattcagcttctatttagaggagaactgacatccttacaatattatattcagccttcctgttgttgctgttttagagacagggtctctcgccttgtagcccaggctggtgtcaaaactcctgggatcaggcgatcctctcacctcccgaagtgctgggattacaggcatgagctaccatgcctagccttttttttcttttttacttttttttttttttttcagccttccagttcagtaacatgatatgcccttattttttattcaggtcttattttatgtctgtcagtaaaaatgtattgttttcttcatgtagatttcatgcatttcttattaagtttattcctggatattttgtattgttatttttgtgagctaaatctttttgtctccttttttttctttcttttttttttttttttttttttttgagacagggtctcactctgtcccccaagctagaatgcagtggctcaccgaaacctctcggctcactgcaacctctgaatcactggctcaagcaatcctcccaccttagcctcccaagtagctgggactacaggcgcgtgccaccccacccagttaatttctgtattattcgtagagacagggtgttgccatgttgcccaggttggtcttgaactcctgagcttaagagatccacccgcctcagcctcccaaattgctgaggtgtgaaccaccgtgcccagctatctcctattttaattggttgttttagctgtatagaaatggttttgatttttatacattgatatattctgctatcttacttcattctctcatttgttgtaatagtattttagtcgattctcttcgatttcctaaataagcacaacatttgtaattcttgaaggttttgcatccttccttcttatattaatgccttatttctttctcttattgtactggttggggctttcagaataatgttcattgataacaaccatggcagccttcaacttacaacttttgtggttttctgtgcccagagtatccatacagaaatatctgtgagtctagaaataacaattagctctgtgtacatcagatagaagcagttagcaaacacccaggtcttgatagctgccctttcactgtgaaactccgtagactattagggttaagggagcagagctttgactgctactgtgagtcccagagaaaggtggattgagtcagggcccctctcctaaccccagaacacaattcttatactggagtgggcatgccagcacgtcctcatttctttcccagcaccactggccttggtgaagagaaaggagccacttgtttactgagcatctactatatacaaggggttgtgctgagaactttagacatataaatttatttaatcctcacaaccaccctgtgggtgagtattactcccttgttaacaaatgaggaaactgaggctcagagtggggagtatggaagatcacacagctaaccatcacttacaaatgggttcattgctgtctgcccctgcatcctcttttctgaaatggatatttagtacagaacattttccgcctccactaagaactctctaaatgttttagcatgctccacacttgtgccagatgaccaccactgtgccccggccagggttgatattacctctctccttggaatgagatagtcactggggaagagctgacttgtccataccctcaggccagaagccaaatcccagaacttgctgggcagcagtgctggtactaggtccttagagcctttagctccaggaagagacacaagtgggcttagaggccagtgcaagggtcagggagatggaggagggaaagaatgaccagggacaggagacaaggggatggagggcaaagaagatgaaaaggaagcagagagaaggaggtgaggacagggtctgggggaacagcagagaaagctgtcagggagcagggacaggctccaggcctgagtccagctgggaccagggaagccaattcctagggcttcaccctcaacatgaactctaaggggccagagaccagggcaacagccactcaggtttctgtttctatcctccaaataatgaagagtagcctgggatgaagacacagaaccagggagcccccatctccacccccacagacacccacatgctcacacaggactaggttgctgacccacagcagagacgtgtgcacagacatgagcatgtcaacacacggacgacacacgggcctgggtccggggacacagagacacagacacaggggaagacatgcagacacacgcccacccaggagacagatgtacagacccagggagagatgcagacagactcgcatgtatctgcccctgagggagagggagatgggagtcaccagcacatgctccagtgggtgcacacgcccccacccacaaggagacaccctcgaggtgctgcgggagctgtggagagacagacagatggccggccccatggacagacagttcccagcaaatctgtgctaatgcttggcccttgaagggcccaacctgtccatgccgtgcctcagagaaccctgggctgccacccagcgctgttccccagaacctcatgagtgggctccatgagcatacatgtggcggccaggctctcctgacacacgtgcatgctccaacaggcctgtgccccacctgtgggtgggggggcgacatctcccttctggagtgcaggcgggggccacgggacaaccccctcctctacaagccacaggctgtgcgcactggcagggacaggggagggggcctgggctagctcaggaggagggaggggttggggggccagggtgcggctggggcgggcacgggagccggtacctgtcaaacaagagccaaggagcaaactagcttcttagtcacctttctcttctccccgttttggcgcagcccctccgggcaaggggaagctgatatcataattattggctcacctggcagctgcctcccctcacctgatgtcagcacagacacaggacggccgagctgacggactgacagacggacagagctcctggccccccagacccgggcccccacgccgacctgcttcactgagcaggtaagaggagccccggcccaagtcagccgtggaggccagcagggccgggctggggcacggggagggcgttcgcctttttaacggggctcaggagtgacggggagcacccaggttctcactgcagctcaagggagactcagaattcgggtgagtgcctggaggccaaggggcaccccttcccccacctccccctccagttccttttctaggttgtccaactttaatccctcttgctgtggtgtgggtctcattctggtgtgtgctggattttgtgtgtgtctctgtgtgttggagatgcgctcacccaccctgtgctgggaggaaatgaggactcaaaagtgttagatctggaaaactagagctgaaaggcagggggccaagttctccatgtagtggttttccaggtgaagaagggagagcccagctctgggagctggggagcaccaagggtgtgtgcagatcaaggaattgctcaacatctccacgcagcctgggctggggtctagatgcctgggcccatgcagaggcctgggttgcagaaaggagatggtgcaccttgtggcgaagcagacaggtggcaaacaggtgctgtggccatgagttgatgctgggcttagggcagagtcgcctcctatccccagctccatttctctcccgcaagacccctaaggcagagtcctggtgagcagagctgggccaggcagggagccctgaggcctttggggcctagagttgggggcgtgggaagtgaaggcccttagggaagtggccgaagcagcaggaagcccctgccagctcccccgactcctccccacccactacccgctcagataaggttctggcattccccgtggagtcccccaggccctccctaaatatccaaagaagcccgttggatgaagagtagactctagcaagtgggcgtgtttgcctcttctctcggcacctacaggcatgggggatatgtctggatgtgctttgtggcaatgcacaactggtcagtgggaagggacccgggcggaggggctcatcttgggaagtcatcctatccatcccctgcccctatgccagtcattgcccacatcgggcagggctgcccctcctagttttcctaatccctgaaggagaaaatctggtcagtttcctcacaatcatgaagtccttcctggagcctctctgaagtctttactgctgcagggtccagctctgcttgcccggtagccttcttcctcccgcactgaggaacactagttcctcggatccgagggcggcgttgcactgcagtcctgtccccaccgggcttggctcagaaccttttaccatcttgctcattccctgaccacaagacacaggcagtacaagggcaccccgagtggatgggggaaggggcagggcctcctatcctggtccctttctcttgtggctctgtgaggggtccagggtgagccaggcagggacagagccaggctgagtcctggagaggggcagacggggtgagggctgccccaggttggggatcctcaaaggcgaaggagccacagggagaggcgcatgtcctcccggctccccgcccagccccgccccgcccgcgctgcctgtgcgagctcagctcccggctccagggcctgccgaggcacgctgcacccccaggcccggcgcctcactcactcccagagccagaaacctgttctcccgggaatgccagggagttctcagaggactttatttcccaggggctcagggagccccagaatcttctggaccagtgggtcctgggaaactagagaaaaattagggggcttaggacccctccctgctccccagctttgtctcatccacgcactgacgccacattgcctccaaccaacagccgtcttcaccgtgagaaggcttcatcgcgagaaggcttaggaaagttaaagacaagggggaaagcccactggtgacatgcaccttctgtcatgtgccatccgttgcctcagggaaagccttcctttccccccatcccccagacagtcccatctggcctctaagaaagcaacatatcgcctctttccttggactcttcaccttctctagctaggaagtccttcctgatgtctaacctctccctttctggcttgagttgacacctggtcttcatggaccagcagaacccccattgcctgcacagggcccaggcacataggcagagactgttctaagtcacaatgaaatgccctggttgcttgggcgctggcagggacagaaaggccccactctcgctgcgcctcttattctctctgactccacattctgacgaagttgcggtccacttctgcctgcctccccatctgcccataacaaaaggatggaggggaccgaggtcctgcaggtatgccctcccctctgtccttccaaatcacagcctgccatccctgctgtggctggcagaggggagttcaggaaaccaggattggcttctgcagcaggagtgactgacagagttcagagaaagttctcagcattttaggttgagtttgactggactatgtgaccacaggaggtggtttcctgagtggagaggcaaccattgatctggggtgggtggggttgggctggcaacatgcccaggagctggggaaggatgagaggacctccaggagctggggaaagacaagatgacctctgggagagggcctcccagaagcacgaaccacatggttccagaatacattgggtctttccagcttattcatctccatcccctgcccctccctccctctctgtgcccaactccaacctcatccctgacccttccacccgtctctgtctctttccccatcataacctatctccattcccaccttcaatcccgcccagcccccttcctactcatccccgtccccaaacttgcctccatcaccaccaccccatcctgctccttcctccttacctcatctcctcactcccacctccaaccacactcctatccccatctccacctcctgctccattcctcaggatggatctcctcctatgtcacaggttcccttggagtctaacacccctcaccagcatccccgccaggttctggggtgtcccccaggttgtctgagcattgaggaaaagcccagagccatgccaatagacaaaacgagcaggacaagatcatccctggagcagcccttagcttcctcatcctatctgggccgtaaaggctggatgctcaccaaacagtaaaaatgagttcagatgcaacaagacaagtggagggctggcgcccagacagacctccacactgcgggcatgtggcagtgaagcggggatggagagacaccctcatagagccccaaagcggggccggggcaggctttctcagggggctgggagcgtaactgatcctatcaggcatggcgggccaaggaagagggggcatggaagcaggagcagggatttttagggttgattaggagtgcgcatccccgggtctctaccctgcctgtggcccttgcttagtcagctcagattaatggggccagggagagaattcgctgaatcgtgatctcttggggaacttgactggagagccagctgtgagtcatggagaaaagggaacctgtgctctcacagctactctagaagcttccaggggtaggcaaccctccagatcctcccatccccttccagaatgcaacagaaagcccactgcaaggtctgaccctcgccctccaccccatgctcacaggaggatgcactgtcagtcagctccaaatcctgccctcatacaccctccggggccttcagggctccccccactgcctctgacaaactacagcacagagacacacatacacacagagacacacacacacagagacacacacccagacacatgcacagagatacatacatgcacacacgcatacatatatacatacagagagacacacacagagacacacacagacacacgcgcacgcacacacacagaatgagaatggggtgcatccctggaaccagattgcctggagacagttggaggtcccacttacacttgtaaattccatagccatgtcccggactgcaccagcccatcagtctcggaaggcatagaatgtacatgaggaaggacacacacacacacgcacacacacgcacacacacacacacacacacacacacacacacatcgctgtgatcagaaaacccaattatcagactctgcacttagcacccctcctccacgcaggcccagagtgaccacagcagtcttcactgtcagtgggggcagtgtccccagcttcctctggagagggttcctggagcccacgttgggcaccaagagcatgtggcttcatagaggtggctctgcttctctgtgccttcccgcaagcgtggtcaatctgcctaaagtgggaagggttttggagaaaaaattatttggggtggcaatgccaaatccagtatgatctgagggtggtcaagggagaaagatggcagctggagccaaggagctggatgggctcaggaaaatgcccccagagcctgccccttctccagggacatgattaggtgctgagagctgcttcccatagccccagcacctggaggaaggagcagcgcacagatgcctgcatagcagggaacaatctctcccactggtgggacctcggtttccccatctgtcagataaagaggggcttgggtgggagggcctcccagtgcacttctcacttcaaggcttagtaagttcaaggagataaccacctgcccatcccctgtgcaagatggcattgggagaggaggtgcaccagtatgtatttgccttgtactaaatctgtattattagtagtggtggcagaattaatatccttaataatagattggtattaatgagcagttctgataatgatatgtacagaatgtgagaggcccctggcccaacggacagtgggatcctgggccatttctttgcccccactcaggtggacaggcaaagagcgagcgcaccagcaggacgagggccctcttgaccatccccctggggcacacccctaggaagggcagatgtttgaaggtaaaaagatctcactcagccccatcccactcctgaaatcctacaggcctgggaccccaggggaggaggcaggggcaccagacaagctggtgctggtttaacttctgaggattttgacattctggttctcactcggtccccaggacagccagatgaggtatgtagggcaaagatgaggactccattttataaaggagggaacaaggtttattctcatgactagcccacaccgagagcagagctgggaaaggaccctcctgcagtccttggtcgggaggactcactgtgagggaaaagggggattctgtagggaagccaggatctgggctcagtgaaggcgtccagagattataacgccaggttacgggggaggtgagaccaagctccaacatccctgttggtctcacagatcaaatcctctgctgccaatcactgccacagcccaacaactccaaagccaattacctacacagcccacaggaggctgggggtgggaccatcgggctcagccctgggtgacttcattacaggggtaggacttccgggccacagggacccagagctaatgagtgcttagaggtcagccacttcatcccataccccagcccatttctccatccccttcagccagtgtagctggaggaagcttgttgaggagggatgaaggcaaggcttcacaatctgtgcaaaagcctcctggtccttcactcatgccccacctcatcagccattctttggcccttatcacagctgggcagactgaggatttcagggaactttcttctctagaaaccaatgtctaaggcctcagatcactgctttctgaacactgccccctggaaggatcaagcaggcaacaagttcctccttctcaaaagtccagctttccagtcaagccctgagtggttctaggccaccttgtccacctccaagtcctaggtcaggccagttctcaccatcagactcagccatggcttcaaaaaatccctgggaataggtgagcaccgtggcatgcacttttagtctcatatactccagaggctgaggcgagagcctaggagtttgagaccagcctgggcaacaaagcaagaccccatctctagaacctggggaaggtggaggtgggagaaccttctccttaaactgcctgtccaagggggttttatgtttttggaactgggaattcccctcccccactaaccttggcggggcaagcttgctgaccttgcttctgggagcaagatgttggggtaggctcccagcctcagagcctggactccagagtagccagggaggcaggagggtggaggaggcagaccatgaatgacacccacaagtaagagcaaaagatccctggaggccgaggatgcttaggtgggaggtctctgtcaaggagcatctaaggagtaggaagaacccagtagggctgatctctcagactagcagaggagagaaggggtcctagtaggtatgtctcagaaaggaatggatggaagctttgaggggtagcatttcttgtttccttgaaaccaaacacccctttctttccatctacaaaataaacatccccagcttggccaacatggcaaaaccccatctctgctaaaaatacaaaagttaaccagacttggtgctgcccgcctgtaatcccagcttcttgggaggctgaggcaggagaatcgcttgaacccaggaggtggaggttgcagtgagccaagattgcaccactgcactccaccctgggtgacagagtgagactttgtctcaaacaaacaaacaaaaaaaaccagaataaacattcacgggtaggtcaaggacatccatccatctatcccactaaatattcatcctttacactacagatactcacagaaataaaaatacttaaaataaaaaaataaaacattcatctatctgtctgttgatttgtccatctgtccagctttccatccatcaatctctccatccgatgatctgtccattcatccaactgttcatctttacatacataaatacatctatctatccacccatccatccagagaggtcaggctctagttggcctccccagggctgctaggaagggcctgtggtcctgtggcatttatggggcatgtgacctgcctgcctggcctggggagacagccccgcctcagccctcgggcagggggccggtccaggcatgtgggagtatttatacctcgatggaggctcctggggagctgcaggctgaatgactccccgaagcggtgatggtggccatgacccagagcccactgtgagtgcttggatttggctcctttggggccatggctgggtggcagaggttagagaggggctggagagacgggaaggtgcccagaggcagccagggatggcgaaaaggaaggggtgctgggcaaaggagagtgggagactggttgctgttggagtcaggcatctgaagcaaagctgggaccctccctgcagaagggatgagtctattgcccttaaagaggctctggtgggtggcttggtgaatggcaggaaggacaggacaagaggactaagattacaataaatagggattagagatctggaagaacctccaggtcggcccaaggctcaagtgcttttccaggatgggcgtactaggcaatgctctgggaccagcctgcttccagaggcacatgggaatgctgaagagtctttaggagaagcctgatttggggactggaatgactcagctgcaggtgtcggtggctcacatggaggaaagcgtcacctgggggacatggtggcttttcatcctttgttctccccactcccctccctgcccattctgtccctacctgctctgtacttgagtcagatctcaaggcaggggcacgcaacccattttccgaaactgatgctgggttaagagccagggaggccagaattttgccctcagaacttccaacattgatggggagaaaggagctagaaaccccctctttcttggcattcccagaccccgagtttccttgggtgcccaagcctcaggcagagcccccaggtccttccctgccacccccataattgccgagctgctccaggggacccctcccagcagcctgtcgggtggagccctgggtggggctacaggccagcacccggccggccgagccccacccctcgtaaaacatgctgccgcagccagcaacagaaaccattaaggtggaactgagccgtccccacctcactcataaagagtgggtaggaggccgccaggtgggaggcagcagggagcgtgaagagagcctggggaggacccttggtgccccaggcctgtctgtccctgtgattcagttgcccacaggggaggcagggacagaccctcccaaggaaacctccaacgtcgcccccacccacctttcaggcttgagcagggaggctgaggcgttaccaaggtggggccgtgtagcgtaatggttcagcatgctggctttgaagcccgggttggaatcctggggagcataatatactagctgagtgaacttgggcaagtcaggttaacttctctgagtctcagtttcctcatctataaaatgggatgataatacagctcctccttcctggggtgtaaaaactcagccaagtcttcctgatctccttgaggatgtcctcaggggcgccccacataaaggcagaggaggggtgaggtccctgctgacagctctgtgggccagatacacctttacagggtacatatctccacagggtacacacctctatgaggtacacacctccacagggtacacacttccacagggtacatacctccaaagagtacagagtacatacctccacagggtacacacctccacagagtacaccccttcataggtgtacacatctccacagggtacaccctccacaggtgtgcacatttccaaaggtgtatacacttccacaggtgaacatacctccacaggtgaacacacttccacagggtacatacttccataggtgaacatacttccacaagtgtacaccccttcacagaggtacacccctccatgtggtacatgcttctacagggtacacacttccacagatgaacatacctccacaggctacacatctccacaggtgtacacccctccaaaagtatagacttccacaggtgtacacacctccacagggtatacagttccattggtgaatatacctccacaggtgtacactcctcaacaggtatacacccctccacaagtatacacactttcacaggagtacacccctccacagtgtacatacctccaaaggtgaacaccattccccaggtgtatacacctccacagatatacataccttcacaggcgtacacacctccacagggtacacacttccacaggtgaacatatctctacagtgtccataccttcacagggtacacatttccacaggtataccctcctcaacaggtgtacacccctccacaagtatacacatttccacaggggtacacacctccagaggatccatacttccacagggtatacaactccacaggatccataactccacaggatacacacctccacaggatccatacctccacagggtacacatctccacagggtacacacctccacaggatccttacatccacagggtacacatctccacaggatccatacctccacagggtacacacctccacagggtacacacctccacaggatccatagctccaaagggtacacatctccagaggatacacatctccacagaatccatacctccacagggtacacacctctacagggtacacactgccacaggatccacacctccacaaggtacacacctccacaggttacacacctccacaggatccatacctccatagggtacacacctccacaggatccataccatcacggggtacatgcctccacagagtacatacctccacaggatccacacctccacagggtacacacttccacagagtacacacctccacaggatccataccgccacagagtacacacctccacagggtacacacctccgcaggatacacacctccacagggtacacacctccacaggatccatacctccatagggtacacacctccgcaggatccatacctccacagggtacacacctccactgggtacacacctccacaggatccataccatcacggggtacacgcctccacagaatacatacctccacaggatccacacctccacagggtacacacttccacagggtacacacctccacaggatccatacctcaaaagggtacacatctccacagggtacacacctccacaggatacacacctccacagggtacacacctccacagggtacacaactccactgggtacacacctccacaggatccatacctccacaaggacacacctccacagggtacacacctccacaggatccatacctccatagggtacacacctccgcaggatccatacctccacagggtacacacctccacaggatccataccatcacagggtacacgcctccacagagtacatacctccacaggatccacacctccacagggtacacacttccacagggtacacacctccacaggatccatacctcaaaagggtacacatctccacagggtacacacctccacaggatccacacctccacagggtacacacctccacaggatacacacctccacagggtacacacctccactgggtacacacctccacaggatccatacctccacagggacacacctccacagggtacacacctccacagggtacatgcctccacaagatacacacctccacagggacacacctccacagggtacagggtacacacctccacagggcagacacctccacaggatccatagttccatagggtacacacctccacaggatccatacctccacagggtacacacctccacagggtacacacctccatagggtacacacctccatagggtactcaactccacagggtacacacctccacagggtacatacctccacagggtacatgcctgcacagggtacacacctccacaggatccatacctccacagggtacacacctccacaggatccatacctccacagggtacacacctccacagggtacagacctccacagggtacacacctccacaggatccatacctccacagggtacacacctccacagggtacagacctccatagggtacacacctccacagggtacatgcctgcactgggtacacacctccacaggatccatacctccacagggtacacacctccacaggatacacacctccacagggtacacacctccacaggatacacacctccacaggatccatacctccacagggtacacacctccacaggatccatacctccacagggtacacacctccacagggtacagacctccatagggtacacacctccacagggtacatgcctccactgggtacacacctccacaggatccatacctccacagggtacacacctccacaggatacacacctccacagggtacacacctccacaggatacacacctccacaggatccatacctccacagggtacacacctccacagggtacacacctccatagggtacacacctccacatggtacacaccttcataggatccatacctccatagggtacacacatccacagggtacacacctccgcagggtacactcctccaccaggtacacacctccacaggattagcctcagcatctttagatgcaaatggtcccagggcctcgtttgacttatagaggaactgaagtacagaaaggggaagtgagttatccaacatcacacagccagcacaatgtctcctggcttccactcctaaacggccccctctgcctgagtcctaaggagccaagagaaggctctctgagaggtggggagatgttgatgggtagagcgggcgcaggccggctgtttgtgagaagggcacagagcaggaatgcagtaatgatgactgttgatccttgatgattattgatcctgttgtcagcctttctgggaaatttctcactcgtcatcccctctactcaagtcaaagggccgtttctttcttctctctgatgccagggcagatcaagtccacctcttccatccccgctccccaaggatcatggcaggcggaaggtggccagaatgcccagacgctgaaaaggtctttggtcaaggttttgccaggggtgccctcctggagagtgagcatctggcggtatggtcatggctctcaagaactgagagtcagatgtggttttcagtcagctgtgtaaccctgcgcaggtcatttcttctctctgggcctcaattttctcccctaaaaaaatgggcttgatgaccttgctcccctgacagtggtgtgttggtaaatgttcaccagtcagctttcaaaagtaaataaatcataatgtttaaaaaggctctgatttgtaggatttgctaatttccatgggcaaatactcccactgtggctgatctccaccaatttcactggatatggagttgggaagaaatgggcacaattggctctcatgagcccttgccaactggctctgcacaccattgccccctaccctctggggcaaagggaggataacatgagacaagagatacaaaagtgcagaggggctgggcgcggtggtgcacacctgtaatctcagcactttgggaggctaaggcgggaggatcagttgagcccaggaggtcgaggctgcagtgagtgatgattgtgccactgcactccagcctgggcgacagcaagaccttgtctcaaaaaaaaaaaaaagtgcagaggaaacttcagagtgcactgcagatgtggaactgcggcaaagggaccccagggcacagtctgccagtgagagcctcagcctctagtccaggaagcaggtggttgtgggttgtgggtacccatattgaggggcagttcatgagagtgatctggaggagctcccggaatctgagaaggcaggagagctgactgggcctcctgtgctggtatttgctgatacttgcacacacatcccatccagttccagtgctccctgaaactggaacaggcaggataaaggttggacctctatgaaagatcccttctgaatgcagatgtcagccccaggacactggggccagcagagagacctcccgagagatccaaaacaagagagtcaacccccctcctctccacataagtcccagaagtttctacagacactagctctaccacatgggaaaggcggaaatgacctctgaggccagagagtcaggaagagggaagtttagcctctgccaatgggagaggacaatgtcaaggacctggaggtagaaggtaggagaaggcaggaaaggggagttcccttcctgatgctcccgatccccccacccccataactcaggccttaaacaaactctgtcccactgctaattattaataatagctatcatttattgagcatgtactatgtgttaagctatttacaagcaatattttattaatcctccagagaggtaagtatttattagtcctattttacagatgaggaaactgaggcatggggaaggaagttaagcatcatgcccaaccaaagtcccacagttcctgcgattcaaatccagccctgactccaggtcgtccagcttcaggggttctgccggctactccagggaagggtcagggccaaggcagcctcatccaggttcctgcagtgagcccttcccagtgatggacaggagcccctcataaacaccagtcagagggcttctgaccagcccctgaggaccccctctctcctgggccgtgtggccttaggaaagtcactttacctgttccctgggtctcacttgtagaatagagctttagctgcaaccaagggggcatcatggtcaccaaatcaggagtccccacttacaaaacctgcccagaggaatcccagaggaccagtcaggaacctctgcatccttaatgcaaattaaggggtgggcctctgaactctgcataacttccttggttctcatcctgtccccgggggattggaggaggtagcagggtggtttggccaagcaaggctatgaaagtcatggctgtgaactgaagcctctgttaaggcctctgacatacaggaacttggctggagctggagatgatgttctggagaatagggaacaggtgcaagaatggggtgaggccgacactgcggggatcattctgggcaggccagaccctcaggaggtggtgcaggcctgagctggagttcagagaggcctccccaggttcacatctgcaggggagcagtgctggggtctgaggccaggctgagtgaaggccaggcaggcaaggagggctagcaagggcagctgccacctggggctgggtcttcagccaatcgccccaggactgccaggcctgaggcaacgagagcatcagagaagctgtagagcctggggccaaaggcccctgcagccacacttggccagcagtggccagatgcatgacacatgtcctcgagcattttccctgtgccagcacctcgtgcacaccatcctcacgatgaccctgcgaggtgggtctgtgtgccccatttctcagatgcggaaagtgaggcacagagagctacacagtttgctcaaagtcacacagccagaaagtgacaaagctggggctggaattcagctgggcttgactccaaatccttgctctaaaacaccgtgctaccccacctgcagggaggggagtggccaccctccccaggttacaaagcctgagatctggcggggaagaagggccctcggcctcccatttggagctggagaatgccagccccctgcaccaagccccctgcaccacctcctgagaaggcagctctgggccggggtgaggtgtggcctccaggcaggcccgagctctccaggaggagctgtccagggagcaggaggcagtgatgcggagcgggaggtgggctgccccgcacctcgggccccatgcctgctccgctgtggtgtcccgttacggccagctcggcgcttccctggtcacgccacatttagcattgccgagtgagcaggcgccaggacatcaagaaggggtggtggggactcttgaaggggcgggagagcctcccaccaggcccccacctagaccccggcttccagcccctccaccactgatcccctgtgggatctttgggcaaatcctatgggactttgggcaaattgcctcccctcattttccctgttaccctgtctgtcaaatgaggcttattgatggtttattcagcaaagatgtgccaaccccagcctgggtaccacggggccaatgaggccacctctccctcccagagctccggaaagagcatggcctgggcacagcacagctgccctgctctggcttgagggggtcttgggtagaaggagtgagtgtacacctcatgcttttcttgatgcctggcctcccagcctagcctaccccaactttgacacccacccaatgaagaaaccataagcagagtgcagagtctgcagtcggacagaccagagttcttgcccctgggcgacttgggcaagtcacataaccccgctgagcctcagcatcctcatctggaaggtggagtcaataatgctccttcctctcattgttctaatagatcaatgagaaaaccatccaaattgttcacacagtggccagcccagagcagaccctcagcaaactgtagcatttatcagaggccacttgggcaaagagaagtacatttaagaggaattgctcttgcaggtggtaaaggaaggcaaaaagctgaggatagtaagagtgagaggccgggcacagtggctaggctgtaatcccagcactttgggaggccaaagcaggcagatcatctgaggtcaggagttggagaccagcctggccaaaatagtgaaatcccttctctactaaaaatacaaaaattagccaggcatggtggcatgtgcctgtagtcccagctactcttgaggctgaggcaggaaaatcacttgaactcaggaggtggaggttgaagtgagccgagagcatgccaccgcactccagcctaggcaacagagggagactccgtctccaaaaaaacaaataaataaaaataaaaacaaaaatacaaaaaatagccaggtgtggtggtacaagcctgtagtcccagctactcttgaggctgaggcaggagagttgcttgaacccgggaggcagaggttgcagtaagccaagatgatgccactgcactccagcctgggtgacagagagagactccatctcaaaaaaaaaaaaaaagtgagaaccacactcacaataatattcataatgagaactggcatttatggggcacggactgtgcaccaggcactgtgctgaatgctttctgcgcatgattttgtttgacactcacaacatctgtgtgaggtggggcctgtcactctcccagttagatgatgacgctgaagttcagagagctttgctggcactgcttgagaggaagggccaaccccggctttgaggcctgagtcctcttaaccaccccactgtgttagggacagggttcccctatgattgcagaaggtctgagcagaaaaagccctccgatatcatgtacccaaggctctaggtcttcatggggaaactgaagatcagaaaggggcagtggcctgcacaaagtcacaggttagagtttggaggacacaggtggaacagcacttgccaggcgctgcagtgtgggtggtgacatcgtcagggcccgctgggctcacagggcctccaggcaaccgggggcctttgggtccccagttacacactgtggtcacatcagccaggctgacctgagggtcactgcaggaccagcctctgctgagggctggctcacctgcatggagggggttgctcccaccccaagcatgagtctgacccacgcaccagctcactctcccctcaggaccaccgacttgcccagtcactgaatggagaccacctgctgtggtcaccttgccaggcccttctctgtagacacaggagaccgatcttgaggagccagaggcagagcccagctgggagccggggtttcactggtcagtcggtcagtctctgcagctgcagcctgagatcagccaagcccctcctgaggctcctacctggctcactttgccctttctccacaggggtctgatctctctgctctgcttttccaaactatttctctttctctctctcgctctctggttctctctctctctctctctctctctctctctctctctctcatcagatggctgactggaggcagggtcccagcccaaggatggggttggggtggaggtggcgaacctgggttggtccccactggatgctggtcctcactctcatggcagacggctttctttgaggccaggactgggtgatggtgtcgctacccccgccgcagtctgacgtcacgctgccgggccccaccagactggagggcgagcgccaaggggacctcatgcaggcaccgggcctcccaggctcccctgccccacagagtgtaagtacccggcatctgggcctgggtttaggccaaggcctgcggctgcccaggcaacaagaagaccagtcaccttaccgcccccagggacctcccagggcctgtcttgtcccctccaccagcaaacaagtcctcagggaccccgagatccagaggggtcactcctcatcccttcagtctgagcctgtcccagggctgtgagccccatcagatttggggtaccccaggtttcatggcagggtgccctcatgaaatcggggccaagggtaggctatttcttctccaccatttagggtcttcccagagctcagccatagaccccctttaccccagaacagagtagggtcccagccagtccccaggcctggttcagcctccactcacaggctcgctactctctgtctacccagaagcatgccggcttcagctgctcgtcatttgtgtccgacggccctccagagaggacaccctcactgcccccacacagcccccgcattgcgtcaccagggcccgagcaagtccagggccactgcccagccggccccggccctgggcccttcaggctctcaccctcagacaagtatcctggctttggctttgaggaggccgcagcaagcagccctgggcgattcctcaagggcagccacgcgcccttccacccgtacaagcggcctttccatgaggacgtcttcccagaggccgagaccaccctggccctcaaaggacactcctttaagaccccagggccgctggaggccttcgaggagatcccagtggacgtggcggaggccgaggccttcctgcctggcttctcagcagaggcctggtgtaacgggctcccctaccccagccaggagcatggcccccaagtcctggtgagtactagtggccagcgagtgtcccatcttcccactgtcccagttcctagcagcctagaaagagtcagacctctgagaccaaagtcccaccttctctttgcagaccttgccactcaagaccagagagttggggcctcctggtcagctggggaggggtgttggcctggccagcatggaggggggcaagtgggggaggtaggccaggctaaagaagctggcagcttcccagaggctcctgagtcaggattccagtgtgtgacttctcactgtttgtttaaatgtccagaaactccagccagacctacacacccatatgcaaatgtgacaagaaaaacacattccagaggccaagggaaagggtttggggaggagccatagtacacagtttttccctccccagccttagcatacagagttgagagaggactttaagtgtggagggacccttcctggccccattctttgcccagagtggggcctgggtgtattcctggaaataccttggaaggttaacatgtccttccatagcctgacctccataagcggcgtgaccctggacaagtcttaacgtctctgagcctcatctgaaaagtaaggtcaacattacctgtctcatgggattgttgcttagggaagataaaagctaaagggaatttgctccctgctcccccgctctggtttggaggtccctgaggcagtgactgagtgggcgtagcctcagcagtgcctactccacatgcccaccagcccccctcacctcttgctttcaaacaggcccccattccagccccaagccaccccaacaaaggcttagaaggaagatggagaaggcggttgggtcctaccaggtgtggccaaaacaggactttattctggccctttgaccacttcttctcaggccccttaaacatgaccacagcctacagatagggcaccatcatctcagctactgcccccaaacctccactcaataacagctgccaatcattctgccaggtgctttctttcaagtgcccccatttaatcccctcaacaacactctagagagttcccaccatacccgtgttgcagatgaggaaactgaggctcatagaggccaagtgacttgcccagggtgtctcctaacctgcaaatggtgaggctgagattgagttcacacccttgccctcccacacatggagaagagctccagagacacacaggtatctggtcgacttgctgggtgaccttgggcatattgcttcccctctttgggctcagccccatcatctgtcaaatgaaggggttggacacaagtgctcttggcccttctaggcccgagattctatgattatggcaatctctgcatcaacaaccccagggcacacccagagagaggtcacagctgatttgcccctctgggcccagatgctggtttcccaaggcccctggtaaccccaggaagtgcaatccgcctcctccagggcttgtccaccttccggggcctagctgcacaccctcctgtccgtactcaccggagagctctgcactaggccctgggactctgtgccggcctctcacacatgggaaggcggagtctggccatcatggctagcagcagctgcaggctccccatgcccagtgtgagagcatccacaggactcacgcaggccagcaactgtgcagactccctggagcagggagcaaaagctctgcatcagggatggccaggagtcagagcggagaggagttactagccccattcagagatcctgctggagcttcctggggctgtacagaggaggaaacagaagggacccaggcccacagctggaccagcctgtctggccactacccatgctcccctcaccatggatcctcagggagagttctggagctgtgaccttttcctggtgtcctttgcacacctactcagagggtctgagacctctgagtcaggcgtgtcgagtgaggtcagcaccgtgcctttgtgctattccagaagatccctgtccctaccccagcacaagtctccctgacttctcaggacagcccagcctcagcctctcccctgccgtgaggggaggcgtagggactgctgtcagttccagccccggctctaccactaaattgctgagttcccttgggaaaatctctgcccttctctgttctctgttgttctccaggaataagctttgggggaagcagaataggggttgcttttatgtaaggttcaagacacaggaaagaggaagggagaaaataaggcctaatctagtcatctgctttctcttccagcagggttcagaggtcaaagtcaagcccccagttctggagagtggtgctgggatgttctgctaccagcctcccttgcagcatatgtactgctcctcccagccccccttccaccaggtgggtctggggcaagtgggcctgcttcccccaggtctgaggatatcgtgtgtgtgtatgtggtgtgtgggtgtctatgtgatggcatgtgttcaccaggataggcagataaggacagcagggccctgaaccttaggcttggccacagcaggtggcgggaatagttaatgggaagagaagcaattgccctcctccaggggtgggcttgtctgagtccctggcaaggcctgagaggcctcagataagagtgtggggctgagatggaggcagggctgtgatgtgagccagaaatgggggaaggaggagagctgccccagacagagagaggggcaaagaggagtgtggtgtgaaacacaggccgagcaggtcgaggaacaagggcttctgtatagtcagccaccatcttgctatgtgaccttggcctccaacttctattagcctagaaagggtgggcacccagtgtgggcttaggggaccttcccacccagaggactccaagtccccatcatcttcagccctttcctcctttcccagcttcagctcctcccaagtgtataggatgccaagtaattgccccacactggcatgggatggaggagttttaaaggagaaagaaaagagccccagagcagccaggcagctcccaggagtcaccaggcaagacagagcaagtggctgcccagcgcccagctccatccacctgcagcctggcactgagacaggccctgcctgtggagcaggttctgcacccggctctctggcactggccctgatctcagccaagccagggaggaaggcaagggagaggggctgggtcagactgctggctttgcagggaaaagaaagagatagagggaagcaaagagaaggcatgagaggacatcctctctgccatgaggggcctgggtggaatgaccgaagctatcctgaggctcatggtctgacccagggtagaggatgtccctgaggcagggacagagattgagccacagaaggactaaggggccaccagaccttaaatgacctcaccatgcctggccctgctttgatggcctctgcagtctgcaccccctctcaagatggccacacccagggctttatggagcctggaccgaggtgactcaggcactaaatgtctcttgggtaacctggaaagagctcttcagcctggagcagctgggggagtcagagtctcctacccccatcccccataaaacaccatccgtggcaccgcagccactccctttgccgtaaaaccacctcctaccccgacctgtccaccaccatgactggccctttcaaagagccactgaaactcataaaaggtggcagtgcccagcaaacgcccaggctggacatcctgcttccggcccagctgctctgggagatgcacaggcactgggagcaccttcctggaagggtgcaggggccgagggcttcacttcatactctccctgcagggtcccgtcaccatagcaaccagagcatcaaaagggctgagaggaaggagctggaggaagagggttttaaggcctctgagatcctgaattacagggtgtggatctcctcacagcccctcagacagctctgctttgggggtgatggggcccatgacccaggagggaagaatctggcctgagccccttctctggatgtatataaatggggaggagggccctcctgggaaaggctgggtaccatgcaatcactctgccccttttgacctcctcagtactcgccaggtggtggcagctaccccataccctacctgggctcctcacactatcagtaccagcgaatggcaccccaggccagcaccgatgggcaccagcctctcttcccaaaacccatctattcctacaggtacatttcccactctccagggatgggaggaggaggggagtgagagggcccctgggaacactgaggcatggaatcctctgggtctaccagtaatggcagcaggtggaaatcataccagtgggcttccagaagatgctggagagagggttcctgcatgaaggcaggggcatagactggatcagctctgaccctttgtctaagcctggggagtcatgtctgtgacttgactcagcagatgctggtgccatgtgatgagcctgccaaggtctcacctcctagggcccagggcctggatctgagaatttaagggggatgcttgctgccttccctgtgcctccccggaaacagacggaagcccccctcaaagctctactggaaggaaatgggggatgaggcctgcagatgtgactcggctatccaccatctgccagatctggtgggacttctctggggctgggttcttaagtgtcagcagacccagcctgtctgggagacccttccatctgtcctttcattcatccaaccaacagtgacacttggccaaatatgtgtcaggccctacatgggatcgggtcatcagctagtgtgagctgaggggaagggagaggaacttaagcatcagccaggagtgcagagaagggctttgtgaaaggcaggatcattcactgaaagacatacacgcagctcttggagtccagcagaaatgagttcaagaccagctgtggaactgaccagcatgaaacctcagggaagttacttaatctctctgagcctctatttattcctctttaaaaaaaaaaaaaaatgtcaggggttgggggcaaggggagggacaacgttaggagaaatatctaatgtagatgacgggttgacgggtgtagcaaaccaccatagcacgggtatacctatgtaacaaacctgcacgtactgtacatgtatcccagaacttaaagtataataaaaaaaataaaaatataagacttttaagattcaaaagaaaaaaatgtcagggtttggggtagcagttcaggctgttggaaggattaagtaagagaatgtaggtactgtgcttggtacattgcataggctcaagaaaccttagttccctccctactctccaacattcatgcaattggctgaggactaactagtaatgacagcttccgtttaatgagtgccttctatgtgacaggcaccatccttaatcctcacaactctgaggtagctattactttcttcacttcaaagttgaggaaactgaggttcagagagggtaaggcattcacccaaggtcacacagccagagagtaactaggccaggatggccacccaggtttctcagattccacaagaccctcgcacgtctgtaattcctgacttccgtgctcacttcaatggacaccttctcattcccttctctttcacctccaatcccatagagcctctcaccaggggtggggggcttggggtgggctcaggacccagtcagaggttcggactctcaggggctttctctttcttcagcatcctcatcttcatggcccttaagaacagtaaaactgggagccttcccgtcagcgagatctacaattttatgacggagcactttccttacttcaaggtgagcccaagattcctccccatcccatcacccccaagtcctggacaggccaggcctctctgagcagaggcttctgtctggaggtgggagaagaattagaacgaaagccaggagagggcttacccccaccatgctttccgttgtctccacctcagaaggacagagttcctacaaaaggtgctccaagtggggaacagagagcccaagtggctcatccaaggttgcacagcagactggagtcagaccttctgctggggaaggtgggcaaggtagcaccgatgggcctcagggagcatccacctaccccaagtgggaagagaaagttggagaagaaataagacactattgctaccccgaccgctgggatgctgtggggctggagaagctagtcagccacggtgactgggaggtcggggctgaagaagccattgccttccaaggtgagattaggatctatctctgtgggtggcaggctcagctgcagttctgccagaaagcggggtgtgggcttcccagtctttgagtgtcccaggctggctcacctgactctcccccaaccccttgggcagaatctcatttctatcattcacagaaggcgcttctgggagccttacccagctccctctctagaggcaggacaggggctcttctcccaaggtggacaaacacatcagacagggtggtccattcccctaaggtcgcacagtagatgggatcagttactggatcaagctatttggctttgcacacccctctctgcgtgccacctagaccctccagcacagacccccttctcctgggatgggtatcagggagaccagagattgtgtgtgaggagtgccttctccaagccctagtagacacaaatctcatctgtcacccaggcagtgggcagttgctgagacccgggtaatccagaactcagctccacctgccagggggtgattcctgcccccaccatctatggtcctgcctggggataatttgacgcttgatgttcaaataagtttatcctgctgggctgccatcagatgaggagtgggcaagttggccggagtggtctgtccaggagtggaaaagtgtgttgatccaccagaggttctggaagggaaagagggagggaggtgagtcgtccctggaattcaagaagcatcaaagcctgaattcagggctgccctccataccccagcaggtcaggggctgaactctccctaacccctaaagcttttggagggtcttctagggtttcaaggggccagggcagagagagggaaaagcccagtcctctcagccttccttccccaccagctcccggcctggcccccacccctccccgcatctcatcttcctggcttaattatttttcctgggagccatgtaatccctgttttatggggctgaggagtgaagaggtctaacagctttttgttccctttggttctagttgttgcttttagccacttgcatcactccctcactcctgagtttacatttgatctcagagagaaagcatctgtgaggatgggatgggccccagattgtgaggcaggccctatggggtgacctgggcagggcccttagctgggggacagagttggaggctaagctctgtcactgcctccttgtgtgatccagggctaggccctttcttctctgaacctcagtttcccagtctgtaaagtgggtcagatccgttggcacatagattccttctgactctgacagttcccctgtgacccacctaaggaaattccttagttcaaagatcccccacctctttccatctctcacttcccttttgaagatcatttttctgggcaaggatagactggaccctggagtggccagcactcatgcccaaggcagctgctgtgggcatcccatagccccatgagtcagggatgtggggctggggaagtgtccagccactggacataattgttagtgctgaccatccctcttccaaacaggaagtggctggggtgggggctgccctggcatcccaaagtcacagattcatggggccataaaaggccccagcgcccattaactccgcccatggggcaacgtggccttaactcctagtggagactgtggtgggagtcgaaggtgaatccctagttggctggtctggtggctcaagaatcctccctggtgaccctgggagccttaggggtcatctcaaccagcaacctgccccaggccagctgcccccaagaaaggctgcaccaggtcctgccagccacttggagtgacgctggcatcaagacccagttctgctgggcatgattcagcttggctgctccctggggcaagtgagctgaggaggaaggagtggccgcccctcattaagcagaaactttgggctgaaagggggaggggccagggaatgagggcgaaggagccccaccggccagagcgagtgccctacccacagtcagcccctgctgaactcagggctgtcacagagcctggaacagagctggaggtgggcgggcagggggcccactggcactcccgccaccgcctctcacccaactgagtcagcctaatggtttttacaaccctccctgggcacaattaccacactggtggcatgaccaggcctcctaatgggtgtttattctattggcacgagcacccccccccactgcctgagggctggcctccccaccagggcacgccccctgggcacactcatgcaaacactcacacccacacatcatacgatcatggctacccacagtcacacccagagagactttctcacacacagccatcctcacagtcgaggaattcatggacccatgaaggagtatccaggagacgttgcttatgccaggatgacacacttagggacgtatgcacatgctcatacgcactgtcccttcatataccaaacccacttagacacacaaacatatgtgcaatgcacacaccgcacacacccaaacactcaccaacctcgcccatctttcttttctcccaagttagtcccagaggggataaggcagacccaggagaggagcattcttcccctaattcccctgtctaaagccagccacaagacctcagagtaatgagtcccccttccacagaggggtccaagcacaggcatggagacccagtggggagtggctcagcttcagatgggagagtgttgtgggtcagaaggcctctgtagcgcccaccagccctggctttccgaatcacctcggcagtcctctgaggggtcaggaagggatgcgggtgggatgaaggcagatttgagatgaaaataacttggggtcaaggttcctgttcacccgtcccctaccaccaaagggtaccaagcaagggatgggtgctgaggaggacaacaagccccagagtgggcggcagctctgtgcccagaggagaaacaggagtgttctagaacccagacctgaagcccgctctggcttcctgagcctggcctgaatgcttgtcttgctctgttccggcagacagcacccgatggctggaagaattctgtccggcacaacctatccctcaacaagtgcttcgagaaggtggagaacaaatcaggaagttcctcccgcaagggctgcctgtgggccctcaatccggccaagatcgacaagatgcaagaggagctgcaaaaatggaagaggaaagatcccattgctgtgcgcaaaagcatggccaagccaggtgaggccggccgggccacgcaaggaagggcccagggtactcatgagccaaaaaaaaaaaaaagagagaatcagagaatgaggcaaggccccgagtaagggttccagtctggggaagactgtggaggagggaggtctcatggtgttctttctctcttgggcctttcagaagagctggacagcctcattggagacaagagagaaaagctgggctccccactcctgggctgtccgccccctgggctgtccggctcaggccccatccggcccctggcacccccagctggcctctccccaccactgcactcactccacccagctccaggccccattcctggcaagaaccccctgcaggacctacttatggggcacacaccctcctgctatgggcagacatacttgcacctctcaccaggcctggcccctcctggacccccgcagccattgttcccacagccggacgggcaccttgagctgcgggcccagccaggcaccccccaggactcgcctctgcctgcccacaccccacccagccacagtgccaagctactggccgagccttccccagccaggactatgcacgacaccctgctgccagatggagaccttggcactgacctggatgccatcaatccctcactcactgacttcgacttccagggtgagctgggggtgggaaagggaaggtgggacaggactggagaggagcacctggcagtgggactcatcttctccaagtctccagactgcagcctgcaagtggctgggtttctggtcaactgaagcagaggaggctggacctggcagggggagcttcccacttgctctctgccatccagagaatggggaaagagggatgtccttgcccctgtctccctcctcctggtgctccaaacatggtccaactgacctcatcatcaaaccactcttggcagggcacagtggctcacgcctgtaatcccagcactctgggaggctgaggtgggcagatcacctgaggtcaggcattcgagaccagcttggccaacatggagaaacactgtctctatttaaaaatgcaaaaattagctgggcatggtggcatgcacctgtaatcccagctactcgaggctagagaatcacttgaacccgggaggcggaggttgcagtgagccaagatcgtgccactgcactccagcctgagtgacagagcgagactccgcctcaaaaacaaacaaacaaaaaaaccactctcagctctggagagactgcaaagggctccgtgttctattctatactcgattgtgagtgaccagtagtctgaacattctcagatgcatttgcattttatcagagttcatcttctaaagcagaaggagagagactctaccctagaggaagagtctcagagctgggcaagtcctggagagatttggagataggagtttggggagggttctacccattccactccatcttggctgctccgtctctgcagatggctaagcccacccattcccgtctaaattccagtgcatcccaggccctgatactggccacaggaggtttggaacggggtgacgacccaggcctcagactctgtgtgcacaggggtgggggacattcacaagctgatggaggcagcctgtcctcagagagctcccaacccgatggggagacaacccaggtttaggaagctattagaaaagtgcacatagatcctcagcccagtccagaagtggggagcagggctcaatcagcctcagaggaagctatagacatgtgggatacgaaaaacatttacttgatcccctgctaggcatcaggcatcaggctggctgctctctatgtgctttctcatctgggcctagaggataggaaggattattaaacctgcttcatggaagcacacagaggcttgagaacttactctaggtcacttagctagaaagagggagagttgggactggaacccaggcagccaaatccaatccagggtttagtcaggccctctctctccagagcttgcagcctggatacccagtgcaggagccccaggccctggtcagccatgatgagggtccacaggtggcagcactgtttgctcctcggactcaggtgtgcatcctggctctgctcccattccctgggccctgcagtggaggagacccagggagccatgcccatccatcccattaggtccagagtacactgccggaagctgcttgatctgggctgcaaatctaccttccttgggagactgggcatgagccagggttcactcccaagtgcacaacattggcatccatgctgtcagcctgtcagcaggcatcaacccctccccaatgcccaccccccaaaaagaaccacagaggtcatctagatcgacggctttcagattgtgctacacgggaggaggaatctgaggctgagaggttcagcaactgcctggggtcacaagctagtgccaggctctgttcccagcacatgtcaccctgacccctgctctctgcagcatgtgaagattgacagggaggaggggccagacagggctcctccggtgcctcccagtgacacctgttctctccttccccatctaggaaacctgtgggaacagttgaaggatgatagcttggccctcgaccccctggtactggtgacctcatccccgacatcatcttcgatgccaccaccccagccaccacctcactgcttcccccctgggccctgtctgacagagacaggcagtggggcaggtgacttggcagccccgggcagtggtggctccggggcactgggtgacctgcacctcaccaccctctactctgcctttatggagctggagcccacgccccccacggcccctgcaggcccctctgtgtacctcagccccagctccaagcccgtggccctggcatgagctgtgcccagcttcgtcagctccagcgtttgcctggtctggaagtcctggccggccgcccacatcgggctcaccttaaaggtcaaggaaggaaaatactacctgtcccctatgccactaagccaacgtgtgtgtcagctggtagctgggggcgcagaggacatcacctggggtgctgcctctcacacatttctgccacgtggtggcccagctcctcacccagggcccccaaagagcaagcgtctgggcaagaggaaaatgccctgtccctagctcacactcatccacacttaagccctcgtgcacacacacaaattattcagatgtacacccacccacatatcttacagccagaggaaccagcactccatcactgagagcccgacttcgtttctggggcaactgagagctgagcgctttgcttaccaaaagctcagggccctgtgccaggccaaagatccccccagacccccattctgacatccacatgctctgcagtcctggccccctcgtcattttctttcccagaagcgccctgtatttattcccccatcttcatcccaacagcccagcaagaaggaggagacagagagctcctccctgggttgtctgtggacccccccaggagctgctaattggcagcacccactcagccattctctacccatccttagtacatgctctgtccagctttccccagggtgacatacagaaggggcaacatctacccgggcaccaaactgagcccaattccgaagcagtgtttggaaaagcccttgccctcggaaacttgaacatgtcctttttccccagtcccgggtgcaggaagggccccctccaggtcaccacaatctcactcctcctccagaaagaaaagttcacatagtttaggtcctggcttaactctacttatgatggttcaacttacactttttcaactttaagatggtgcaaaagcaatacacattcagtatgttcctcgacttaggatgcggttatgtccgataaacccattgtaaattgaaaccaccgaaagtcaaaaaccactttcgacttacgatgtttcccactcacgatgggtttctccggatgtagccccatcataagttgaggagcacctgttagttacttccaactgtctcaggcaacctgggcattcaggagaaaagcctggcacagggtgacagggaagcacccatgcaaagcacccccgctttgactgcttggcagacctagggtgcccgggaagcacaagggatacccttggccctgcggggtgtggcccaggtgcctgccatgagcctgaccccatcgagggggaacctcagcccaccctgggcctgggggtgacaagaacttccacaggttggccccaggcttataggaggcataagcagatcccgcgatggcttgtcattgtcccctgtcctggaacaataaagcaagtgccttgtggtctcactaccaagctttcatttctggcccctctccctaagcaaaatggccaggccacactgatggcagatgccctgggcctgtgacgtccctgtcaccctcacccagaactaggaagtttctaatccaaagagtgaggcatctaggaaaacttcttgacccactggggaggctgaggagcaggtgagcagggcctcttcccaggagaacttccaaagagatgcagggaagaggctgccctggccagaggaatggaggggatgccctcccccagaccccttgcctctgaggtctgcccactccctctttgcacccccatctcctcacacaagaaggagttgctgccctgtccaaactgtgcctttctgcttccaatctgtccctggctgaaagagatgccaagtggtttggggccctgagttccacaggtgacaaaatggagcatgccctggtgctgtgtgcactgctggtcctggagagtggtctctggatggtcaggggctcactcagtcccacttcagactcaccccctaggtgtcacctccaggtggggttggtgtcaccgcagcactgtctcaagagagatggggcagatgtgggagccaaaagcacatacatgatccccaggtcccagagcagccacaagtggtgtctctgcttagaaagctcttcttggatgaaggctgggcacggtggctcacgcctgtaatcccagcactttgggaggcccaggcaggcagattacctgaggttgggagttcaagaccagcctggccaaaatggtgaaacctcatctctactaaaaatacaaaaattagctgggcgtggtggtggacgcctgtaatcccaggtactcaggagggaggctgaggcaggagaatcgcttgaacccgggaggcagaggttgcagtgagccgagattggaccactgcacaccagcctgggcaacagagtgagactctgtctcaaaaaaaagaaaagaaagcacttcttggatggctaggcacagtggctcatgcctgtaatcccagcactttgggaggccgagatgggtggatcacttgatatcaggagttcgagaccagcctgagcaacatggtgaaaccctgcctctgctaaaaatacaaaaattagctgagtgtgctggtgggcacctttaatcccagttactcaggaggctgaggcaggagaatcacttgaacctgggaggtggaagttgcagtgagctgagattgtgccactgcactccagcctgggtgacagagtgagactctgtctcataaaaaaaacaaagctcttcttggggctgggcccagggggccagccaacacctacctctgagaggataggtctgcaaaagaccccataatagaaccccacctaccccagcacccgccccagcagaggctggaaggctagatgcagggctggtgggctgaggtaggatagggagtggggaaggcatggccagcgggtgcacccaagaggaaggcccacctgccccagcctggccctggctgtgtaggaagcaggtgcaggctctttgccaagacctcaggcgatgttgcacaccagctctgtccaaccctgggcctgtgtcttgatgacatccaggcccccaaacacagggcaaatgtttcctgggagaatcctattgggacccatttgcttgcctcgggtcctgagactctgagagctcagacaaacctgccttatatacccaggctaggccatctcctccaggagaccctctgtcaaaactctggccagtgggcacattcagcacacctgtgtgtgaactggcccctaatgcaagaagacaggtagcaagcaggtaggacttgggtctagttttgtgtgtgtgtgtgtgtgtgtgtgtgtgtgtgtgagagagagagagagagagagagagagagagagtgtaaccaggccctcagactttttttaactgggcctcagttccaccctgaaatgagccccacactcccactcatatgctgccccctgctggccaccccataccaagcatatagccattattagagtgagcaaccatctttttaattttatttttctaagtaaatatggggtctcgcgatgttacccaggctagttttgaactcctgagctcaagtgatcctcccacttcagcctctgttaggtgctgggattacaggcgtgggccaccgcacccacctaatgtttgtattttttgtagaggtagggtctcactatgttgcccaggctggtttcaaattcctaggctcaaacaacgccacctccttggcctccctaagtgctaggattacaggcatgagctaccacacctggccagggtgagcaacaatttgtctgaatggatgcagcgtcttcaagtccgttatttggagggaattaatccttttgctcagggattctaaatgtgagagatctcaaatggattagaattcccaggtcaggaacttgcatgaaaaagttacatcttcattttctctcatccttacctgaaatctagaatttccctctattgtgaatgtcagcaacaaatcacactagcattggcaatacctgtgactttgtcaatagaaatcacagatattttgtaattgtattatagatagtacaaaatatgtacaaatatatacacatgcacacacatatacacacacataaagtaatttgtcgcttaacaacagacatacgttctgagaaatgtgtccttaggcaattttgtcattgtgcaaacatcatagagtttactcacacgaacctagatggtagagcatactgcacacctagaggctctatgggatagcctattgctactaggctacaaacctgtgtggcatattagtgtgctgaattctgtaggcaattgtaacacaatgcctatgtgtgtttctacaacacatagaaaaggtacagtaaaaaatacagtattggccgggcacggtggatcacacctgtaatcccaacactttgggaggccaaggcgggcacatcacttgaggtcaggagttcaacaccagcctggccaccaaggcgaaacctcatctttactaaaaatacaaaaaattagccaggcgtggtaacacacgcctgtaatcccagctactcagaaggccaagacaggagaatctcttgaacccaggaggcagaggttgcagtgagccaagattgtgccactgccctccggcctgagagacagatcaagactccgtcttaaaaaacatatatatatatatatatatatatatatatatacagtattataatcttatgtgactgtcgacatatatgtagtctgtcatgacagacacatcgatatctagtgcatgattgtagatacacacacacacacacacagtcatctcacagtggttccagggcctcccacaaattccaaaatccatgaatgtgcaagtaagtccctgatataaaatgatggagtatttgcatataacctacacacatcctcccgtatactttaaatcatctctagattacttataatacttaatacaatgtaaatcctttgtcaatcattgttatactgtactatttaaggactaatgacaagacaaatgtctgcacatattcagtacagacatttctgatgcacagttggctgaattcacagatgcggaacctatggccaattgtatatagtttttaatacataaaataaataggataggcctggcagggtggcttacgcctgtaatcccagcactttgggaggccaaggcaggaggatcatgaggtcaagagatcaaggccatcctggccaacatggtgaaaccccacctctactaaaaatacaaaaattagctgggtgtggtggcatgcacctgtagtcccagttactcgggaggctgaagcaagagaatcgcttgaacctgggaggcggaggttgcagtgagccgagattgtgccactgtactccagcctggcaacagagcgagactctatcccaataaataaataaataaataaataaataaataaataaataggataacaatatattttatgttcctaaaatcctttttattgtccataggctttagcagactgacaacaagagagtctgtgacacatagaaaagtaaagcaaggggctgggcctgtaatcccagtagtttgagaggcaaaggcagaaggattgcttaagcacaggagttcgagaccagactgggcaacatggcaaaaccctatctctacaaaaaattagctgggtatggtggcacatgtagcttctgtagtctcagctacttgggagacgaggtaggaggattgcttaggcccaggagtttgaggctgcagtgagccatgattgtgccactggactctggcctggacaacagagcgagaccctgactcaaaaaaaaaaaaaagggtaatgtccttgctttagttgccagatggtggggaagtggagggtgactcttaggggaggggccaggctagggcggcctgggacagcagctttttaacagctggaagggaagatcttagtattttaaccactggtttggcagtcccagtgagcaccttgccggccagcccaggagggcacgagctgtgggtttccctgtggtacttgggctttccttctctacccaggggcaggatcctcatgacacccctaaagagtcaaagcaggccaggcacggtggctcaggcctgtaatcccagcactttgggaggccgaggcgggcaaatcacctaggtcaggggttcaagaccagcctggccgacatggtgaaaccccgtctctacaacaatacaaaaatcagccgggcatgatggctggtgcctgtaatgggtccagctacttgggaggctggggcagaagaatcacttgaacccgggaggcagaggttgcagtgagccgagatcatgccattgcactgcaccctggagatcatgccattgcacttcaccctgggcgacagagcgtgactccttctcaaaaaaaaaaaaaaaaaaaaaagagtcaaagcaaaaatgactggcccatttcagagacaaaagggaattgccccttcaaggtcaacagctcatcaacatcagagccaagactagccccacctccaccctgtcttcctcccaggcagcctctaggttcctagggacagtgccaggaactaaatgcagcaagatgtaccatttgcaataggactagtgccagaggcatgaagacttaaaagaaggcatggggccaaggcttttcccaacctaggctcctccaagcccaaggaacgcaggcctcttttcaaggtgagtgccaactgggtgcctacttcagagatgagaacctcagaatagggaccctcctctctctctgaagatggaagtgcagcaggcccaatctagaacctcaacccagttttacttagcagctgcagtgagtagaactattatcagggtattgggaaaaggtcctcttccttgctataccttctctgcagacttgtaaccccataaactacaacagcaaaatcacccctatactggcctttctttcatacctgtacagcctcatctgcaaacaaatccctcccttccacattcttgtcctcattctccttctttacctttgtggcaactgatagttcctgcccacttgctttgtgatgaaattctttcctccaaaacatggctctgctcccacctccctggaggctcactcctcctgtctccattgtttcctttccttccgccctgctctcaaacactggccttccctaaggtgatacattctcgttcaggcaccctcaattaggggatggggatttgtattataatagcattgtttgggagaatcccagtaattgcaggacatttggcattcctaaataacaagagtgtcagtggaggaccccatgatctcagccaccatcatagcttcagaaatcaccttgtggccgatggcctcgacaatcaccacctccagcccttattcccctcctggtcttagggcccacctttcctgtcttctggtaatttcctccatgccacagcatgtcccagtctgaagtcaccctctcctgctggcatccaccttgatccaacctgcattcccaaacccagtgatggcacctgtagctaccccagcacccaggccacaaaccaggcagtcagcctcacctcctccctctctccaacccactcatccaatcagccaccactcctgaggatctcacctcttaaaaatatcagtttcacctgtttctctccatctttgaggatactgacctaattcagtttctctttctctctcaccagattcctgcagcaccctcctcatcctcactgcccccctgcctttagtatggtagtgcatggagccggactgcctggattcaagtcctggctctgccacttcatagctgtgcaacgttggctgggtacattaacctctctggacctacattttctgtaaaatgggcatcataatagtgccttcctcagaaatgaccatgtttatgagttaacacatgtagagcacccagcctggcactcagtaaatcttggctattagtgtcattctttccaatccaccattcactcagcagccagagataatctgaccaggtcatgcccacttaatcctccacaggggctccccacttctcagaagccctgctcctaaggctctgccaatctgtcttcttttcacatcatattgactcttgaacacacctaggcttatgcccataatcctggcactttgggaggccaaggcaggaaaatcccttgagcccaggagtttgagagggagaccccatctcaaataaataagtaaacaaacaaacaaacacctgacaaatcttgcctctgagcctttgtttatgctgttccctgtgcctaagcactcttccccatcaatttccatcacaagcacctgctccagtgctacctcctctaaaaatcctccccagaaccctccacacagaacgactctgattcttgctctccgtgtccccagtcctttttttttccctagggacgagtatgtgttccttgtgtctcactcatttcagaattcccagaattcagtgcagatcctagctccaccccacttcccccagcaagggcttcacagaatcaagctgaatgccagcacttctgggcctcctagggccagagctcctcagcccagagggtgcgtcagctctgggcatatctgaaggagggcctgaaactgtagggtgtgctctctgcccacctcagttcctgaatttcctccattaagcagccccctcctctgagtctggggtgggggtggaggctgagggcagtgttatgtgcagggctacccaggcatgggggctccccaaggcagctgagggcaaggagatggctccaggccttagccaaagccctgccaccgtctatcatgagggctaaaaacacaacccagtggtcctagtggcctctggggttcagggaaggtagcgtggaggacaaggccaaacccccaccccccacaccttccccttgcaccctggagttcagggcctttgtttcggcctctgttctgccagggttggctctgactttgggccaaagcttcccctctcagggtctgggtctccttcatcacaagaaagaccctctccagctccatcatgttctaaatgctgactctatatggtgtcagggtacagagaatcaggggacaggaagactaaggggtgagagtgcactggaatgtgggaggtaggagaaatttttactgccttaagcacattcctgcctatccctgctcccttctttgcccatacacacagaggctggccacaccagagaacagaaaaggaaaaagtttattgaaaactatatacagttggtccagctcctaccatgggctgcaatctcagccagtccctcccacaccttaggcagtgtcttggcccctcatggggagggatggggctaggcctagggcccagactcccttgggtggcttggcagctggagcccaccgtggatctttgtaaatttacaactctaaatggcctgaaggtagtgggcaggggacagggaatggatccctgcctgatctagtcacagccttgataggggaacactattctgaaacttgggcccaagtagggcccagctaagttgtccggaagtcctgactgctcctctcacaggccttcctagacgtggaggcaaacagcctccctacgaccccaccccatgtagcaggccgcatgggcttcatgggcttgactggggacaccaggtacccttcctcccaacattgactcagggtccggagctcctggagaactccccaagcagaggacttggggttgaggggtgagcgttggggaggtcacagctcccagcccagaactggagcctcctggggtcagggcagccgtggggtcagggtgtcccgctgtaggaatagtctgctttattgtgcatcaccagccggtcatccacgaagtagaagctgtcagactgggtctcatacgggtggcggatcatctcgctgactgcaagagaggcccagccaggccgggcaaaggtcaggagcttgagtcccgccactgcaggggcttcaggactggggtacagggacagccaaacagcctgaaatatccccagcctctttctctacggatgatatgggaatggtggcagacacagaagagccccagggtggggagaaatgggatcagacccacaagtccctctccctcccgcagctcagtctctagacgcccccacttccccactcccagaagaccctgcccgcgcactcagctcctcggagagaggggggaagtcgtaaatgtgctcgcaggtgttcttgctgctggggatgcagaagccaaagtggaagtcgaagcttttgagtagctggttgcggaagtagtgcctctcgatcatgcggaagttgttgacaggcttgtctcccactgtgaactccaccctgagcaagaaaaggaggcagggctaagtctgtccttgaagtcaactagccagccaggctcaggacaggccacccctacgagaggctgagaagggcccactcacaccctctccctcacccccaccaccacccatagcccagcgactcacgtggctcccacctgcctcaggcggaggaaggcaggcgtgaactggtagcggacaaagcgcccagcattggggtccaggtcccgccggttgatgggcaaccgttctgcaatgtaccccagctggggctcagtgggcttcaggctgggcccttgtccacccagggttctacccttgggtccccatctatctgattttttttaaactccccaagaaattccggggcacactgagggctcagaccattggccaaatagtgccacctaggggttctaggtctgcatgttcccaatcgccactgtgcttccccgggccacaggatgctgaggcctgggacccgtaggactgcagttcccagagagccctgcagagggcaggttggcagggaccgaaggggtagggctgacctcgcaagatgtccagcctcagaaacatatgggaaggaaaagaaagggcccccctgcctgcagactcctgagaatgctggggtccaagccccagctctgtggactcctctgtggcccaaggattccctgggcagcccactccgcagctcctatctgcctccccatcaatggcccacccagcccactcacctgagactgggggcttcttgatttcaaagaggacagtgcctgagtccatgtcccgaatcttaaacctgacaaagtcgatcttgtagatattctcctcaggggagcagaggtagtctaggggaaacaggcagctgagcaaggaaggggccgcaaagcccctgctgccaggtcagcttgtgtgggaccccagagtagctaccatcttctcatccctgggatcactgccctctggaaagagggacctcagtccctgcccttggggtacacccccagtgtggaagagacataactccgccatggggatctaacaggggataaggagtgccatcctactggtctctgggggccagggaagggcagggcagagaagggtagaggacaaggccacctcctgaacactctctctcccactctggagttgagggtcctcattctggcctccgctctgccaaggctggctagatgactttgggagaattaggtatccagcctggtgggagcctctcttctcatatgggaacaacttcctgcagtctgacctgtctcttctactgcaactcagtgtatcaacttctctggtaccctgcctttgagaaccacctgtaaagggggccacacagctctgtcttgggagagtcactgtccttctctggaggatactcctaccctcaccccacagctgcccctggcatgacatctagatgtatcaggtgaggctgatgttaaggggactttccctgatatgggtggggctggggcaggtgaacaaccccttccctattcctcctctcctccaaaccccctcctctcagtaagaagcttacaccagcccagctcccttaagcagcttaaccaaagctctgctgactcaagcccagagcctgggatatggcaggtgggaggaggccaactttgctctcatcctttgttgatctccaaatgggaggaagtcttagcaagcagagagaacccccttagaggtcatttacgcagccctggctatgagccaccaccatggagaaagtagtcctggacccccatagagaagaacacaggctaggccaggaggagggtgtggcaggtgcagcagtgggtgtggaaggggtaaggggagtcctcaggcccaggaagggaaccaagaacagtgggaggccctgcctgaggaagctcagggagctacagggcctgatctaaccctcacagctcttgcagcagcaacttcaagtgctcagggaggccctggcaacaaaaagagctgagaggtgcagggagggactcgtgctgtcagcctgcacagcatcacatcctcccctggtggcccacagaggcctggaaatcaccctccaggcccctgggccacctcctattcctctggggcaggaacaggaagtgaatataaagtcattttctcttccccaggtctgcttcttccccaagcctgacgctgtcccctccaggaagccctcctggcagccatctggtaccctggggcccagcatggactttatacagcttggggaagaggcagggccctgagtctactacagcccacatgtggggtggggagagaatggaagtgggcaacccctatctcaccccattcaccctattttcacagaaagtaagcaccagtataaagacatagaaagaaggtacagagcatagggaacggaggtggcagagtggggagcaggatcccagtgcccaactcccagatccctgtaaggccttctcttctcccattctccaacttttggagcctctctcatttgggaacaacttcctgcagtctaacctcagtctcttctactgcaaactcaatctatcaacctctctgtccttagaagaagtgaggaacacggatatctatggctcagaacaccacggccactccttctcttctagaaaggatgaggcctgggacccagggtcaggtcagaataaggggcagagtggccaagggctcagaacacaactgctctattcctctcagccacaaatagcttcctaagctggattcagggcccagtaatctgggaacagcaaacctcagacctgcatgattagggtcagaagagaccaggcaaggggtgccagggtggaaatccctggaactctgttctcaattcctgcacaggaaggggttctcatgaagccctttcctctacttacccttcacagatgccccatctctaagggctatgaatttcctccaaattaggagacaaatggtggtacatgagctggaagctccctctagttgcaaaataaacccccaaagttactcaggactcagtcagtctgagaaagttctgccccagagctaagctgaatcctaaatgctgctattgcaaattgtagcccaactggcttcaacatcagcctggtccagcctccctctctccattgatgcctgcttgggcaagggagctcagtactctgggggcccagctaagaatggctgctgcctagctcagtaaggagagaggaattggcccccagggacccaggagcacaggctcaaggctgtctcccctccacagctctgtctgggagtccggtgttctgctgctttggaagctctagggctcaggtccactccaatacatgccccccatacccacagagaggccccccccaacagttattctcacaaagggggccagggcaggttgctggtgaatgtggccaaggtggagagccactgtctctccatgcacctttcatcctttgaggctcatccaaagcctctgctatgaggtttcctagccctcgttccctgcctatgatgaccccctcccctgccctgaaagccaagttgtttgactccaggcagcagctatgagcagccctgtagggcccaaaaatactactgatcaaagagcccaatgtacacagcatgcatagatgccaggcactgtacagaatcagaggacttatcttcacaataatcttacgagaaaggtatcattatccccattttacagatgaaaagacatgctcagagaggtgaggttacttgcccaaggtcacacagacaattatatggcagagttggaactccaacccaggcagtccagctcagaaactcttaaccacagtggagaccaagcctcccttgatgacagagcccccagaagaggacaggtgctagtccaggcttggagggacattatgccactccccatgagaggaaccacagccaacacactaaagctgcctgctcagtttctttcccggggaagaaaatggcccaagtcttcctggaggatcagggtgagggtattaatggttggggagacatgaagagtctgaatgcctcccaagtaactcagcctccacctagcctccagcgtgggggctgaggacaggctgcactcagcccctctcttcattagtgcagggacgggcctcaaagcgctctggagactccacagctacagggctatggttgcagctgctgccgcacgtacctccacgctgggaaaaggggacgggcccctggaaaaggaaggaataaatctcgaaagggagaagaaggaggcacagagagagatcaagggaagggggtacacagagatctcagacctggcggcagaagggagagcaggggacacaggagaggggactcggtgggggaggggaggcgggaaagggggcgggggccagggcttggcgcgccgggagggcccctcgcaccctctccccttcccacccgcgggcggcgctccctcgcgggtgctcaccaccggtgatccgctgcagccccagcacgtcctccggcccgatcggctgcttcctctgcagcggccccggcctgggccctgggcctgcgtccggctccgactcggacccagattcggattccgcaggcggctgtggtatgggggccacgctctggcccgagggccccggagcggactccgtcgccgtcccggccccaccgccgcccttcttcaccttcatggccttgcggggccgaggctcgcctgctgctgccgccgctgcctgcgccggctggagccgggggaagtgggagcatccgcagccccgcccccggccggggccccaggtactgccccgccccggccccgcccctggggtgggccctgcgctgatcccgcccgccgcccggcccaaccctcccgaaatgcgacgggcgcgggggatgggagtcggggtatcctgccctgggcttcattctgtttttctaacactttcttgtactggtactagtggggtcctgactacctctccgcttactcattgtgttccagcctttctgcccgtgagttccaggctcagggtctctgcttggatggtcttccccagatggcctcttttctcctagtcacagctcaaatgtcatctgctcaaagggcctccctcacacccagtctgaagtccttccccctcagtcaccatctgaccagcctgtttttgtctttctaatgcattatgtgaaattatttttatttgtccgctgactcttccccctgaaagctcagctctgtgaaagcactggtcctgcctactttgttctctgtaggacccctgtacctagcagaaggctccctgcagctggtgctcaagactttttttttttttttttttttttttttgacctgatgaattagtatctcaggtaaaaagcagatgctaacagccttgggcaatccagctaggaagggcacatggccacgtggaagcaaagtggacctgtgggcacaggaggacaaacaccaggaaactgttacttacgcgtgaatgcagaaagagtagagctcagactttgtatcattccaattcatattcagccagtgtttattaagagcctactacacgccagacactttacatgctgatcacatttactcctcacaaccatcttgtaagggagacatcatcagtgccatttgaacaaatgaaaaactgaggctcagagagattcaataccttatccaaagctctccagacaataagtgcaaaaacaaggatttgaattcaggactgtttgattccaaatctggaactttctggaacctctgacacacacacacacacacacacacacacacacacacagcaccatgtcctgagctgctgcctcctggactcccgccagactgcacctgacagacaaagccaactaggagggaggggagtgagggagaaggtcccacaggtgaccaatgcctggccccttcatgacagcaggggctagggctgtcccacagggactagagagaggtgtggaaggcagggactttcccataatgctccctcctctcagtgcacaagtgtgctatgttgagaaatggggcaaaagaacaaacagtccttgccacagagggagacaggcagcagccttatcaaacaagataaggagacccggatgatgtgccttttgaggcccctggtggtggaggaggattgagccaggtgaatgggaaaggaagaaaagatgaacccatcttggagtgttgtactttggttgctggagagccaacagtggagactggagacaaatatttaagtcattccggcaggccccatgtacgtgcctcacaatctaacaccgcccaccttggccagaaaggaaggcttcctatggaggtgctgccctgctcagtctgtcttctcaggctttctccaggacttgcgggtctccaggaagatcttgaccagggacaggaggatgggcacagccataggcaggaagagtgggatgtagatggcaaacttctggtcatcagggaaataaaggaggtggaggagtgacgggtcaaagaaggcaagctcagaggatgtcacagcttcctggctggcgacaaaggcagatgccaggtgcccagacgccaactcttctgccgacttctggacggcagctacagccttgtacacctaggaaggagaagggacaagagggtataccagtaagtcctaggcattggtggaaagggtgctgggccttactgtgccttccatctaccaaggaagatgcctggagttcatccaggatctatggaagtctttctacagggatatggtttattttcctagggtcagcttgaaacctcgcactctcatctgcactcctgcttgggggctggtactgccgtctagaggaaggctgggacactaaagatggcaagcccacacataccatggacctcacaggctctctggtctcaccacactctggccctctctggctactccagtcccaagctgcagaatccatcccctgcctgcttacctcagatgccacgtcgtccttaatgacaatgttgctgatcttgcccagaagctgcgccagggaggtaagggtggtggtggctgtggccaggttctccactgaccgagcccagagcagccggtctagctcccaggtcattagcccttcactcgtaggccctgaaagcaggcattttggaggcagctggggctgagcaatcccaaagagcaacctgtaggaacatcggagtaagatcaaggtggctgagaccacaaggcgggagatcatggctaagatttctcaaatatctgtcctgagccagtgattttcaatcttacccagaaccataggggttaaagggaagtacctcagggtcttgggggcataaggggcaacaccaaacaagttggccccaaacgctgcttcaacaggtgtttctgcttttacctgtttctacattagatttccaagatcttgttttttaaaaaaaggttccatggctaaaatacttctgataacaccaactcagtttaatcctttcaccttttctaccctctctttgaacaaatggggccaatgggacttagcattaagggatgatccaggactgcctttgccaaggcacatgtgctgtgcttctctaagcctgcatccgtgagagacactgctagtcaatcagaagaatactctttcctaatgagcccagatacagccttagaatcctcaacacagagcctcaggcagccactctcaatccatcaggcagcataagaattaacagctattttcttaagcagccctaatcacactccatggacctgacattcatgagtctatttttcttaaaactggttttgctggctgggcacagtggctcacgcctgtaatcccagcactttgggaggcctaagcgggtggatcacgaggtcaggagttcaagaccagcctggccaagatggtgaaaccccgtttctactaaaattacaaaaaattagccagttgtggtggcgggcacctgtagtcccagctactcgggaggctgaggcagagaattgcttgaacccgggaggtggaggttgcagtgagccaaaatggcaccactgcactccggcctgggcaacagagcaagactccgtctcaaaaaaaaaaataaatgattttgtcacctactagtccttcttagaaggatgatgggatccttagaaacttttcttggtttccctggggctctaggcacagccaagatatccctgccaggtaagacttgattccactttgcaactcccctctacagccaaggagactatgtccccaagtggatcatccaggacctcaccgcaactgtgccaggaacacctccatcactcgcaccatgtccacctcgactctcactggcagcactgaggcattataggttttggagtcaacattatatacctgaaagggggaatgagattgccacaacatcataccaggcccttgcacagctctgccctaggcactctggagagaaaaggaaaacatattctgtgctctttagaagctataaacctcatggtatagctaatattttttgagtacctactacggagagcattaaatacattatcccaattacccccttgaaagtcctgtagaacatatttttttcttatcccattttagaattctcccccatgagaaacttccagtctaacaagggagacaaggctcccaaccttgcaagactcccacaaataaggcgaagatctaagatggacacagaatgatcctaggtaagggcaaagggtcacagtatagaaaacactggcggaaacaaaagtggggccggcagaagaggggcatgagcacatagcaccctcaccttcctggtgcctgcccctcccacaggctgggccatggaggacaccagaaggaaaacagaaggaacacagtttcagggacacctgcctgtcccagaagcatgggctctggggtctgcgtagtgtgactattaccataatgccaccccagcggggactatggaaggcattggtggccactggagcgccatccttgtcctgaatgtacagcggtgagtgtgcaagctcaggcacgtagagtagaaagttgagcacagggtacaaggaggcagcactggatcctgtggtataaagggaaagcagaatatcaaaacatgctggacctggaccttagtcccaggtcggcctctaacttgctggtcactcactctgggactgattccccaactaacaatcattaggatatcctcctgtccagggtgtctctagtaaagggcttcagaatgttctcccgagatgtgccataccgatggaaacatagtccttagctccaaaacacccccgaattctccctcctcaaaggccccttgactgtctacgacagctttcttggccactcccacaatgtacccatattactacagatagttttatgcaaaccagaaatctgaccttatgtcagttccctgcttaatatccctcaatcactagccacccatatcaggttaaagttcaaactccttaacatggtcctttatgacctggctcctgcctgcctaaccggcttcatctttggtcactcactcacatttcagccacactaaactactctgagcttcctgaatgcctaagctctctcacttgtctgcatctaagctcacagttccctttgcctgaaatgcccttcttttctctactcagcactgtcataaggtagtccctcagtcaatgtttgctgaatgaataaatgaacggaggaattttctaaggcctcacatgccaccccctcacaatccttgggccacactagcctgcctctggtatctgagattccacaattagatatactcactttggtttgcctgtgttacagttcttagtcacacctcctcttcctagtttccacccgaaaaatgaaaaactctaatactagcttcaaggttattcaacctcaatcagcagaactgtcaattcaaattctgccctcaagtacttttgctgttgtctttcctatgtgtgtgacagcctctctcctagatggcttttagggagatagacccagcctagtcattcatttgtaaaaagtgctaggaatcacgtttaataaatgcttttggatatgataggtgtgaagatggagatatcaacagagcatcatgaaaaaggaacctagggctcaggcatagtggctcacgcctataatcccagcattttagggggctggggtgggaagatcacttgaggggagttcaagaccagcatgggcaacataatgagatcctgtctctaaaaaaaattttgaaaattagccaagtgtagtggcacatacctatagttctagctactcgagaggctgaggtgggaagaccacttgagtccaggagttggaggctgcagtgagctatgactgtgccactgcactttagactgggcaacagagcaaggccttgtctcaaaaaaagaaaaaaaggagcctcaatctccacagtctcctcggaccaacccaacctgggaaccatcactgtatataatccacctccaactcctgtcccctacccagctgagccgtcagggtccctccctagcctggcagaaaagaaagaccctcatccttaggtgctcacccagccgggactccactgggttgatgacatgggggaggctgtgcatgtccaaatagtagctggaggaagctgagtcaaagcggggattcacccccaacattgcatagtaaagaatctgtagagcaaacagggagtggttactttgtttagatttatattctactttctcccaaaaaagatttgaggtgccttaaaaaagacacaatcaggacaaggcaacatataagagacaaaatcagggctgagagaaaataattgcagaagaaaatagcaaagccaagggtaaactgaataaactaaatacgtgctttaaaaatcacgtattttaccaggtttcctaacagtctacacaaagagagaaacaaagaacagcataattcagtgtctacaagatcaaatcaagccagttattcagaagcaattactcccactaggaagacctgataaaaatttctcccacgtgttttccctacaaggagacagcgtgatacagaaagctacattcttcacatcttttttttttgagatggagtctcactctgttgccaggctggagtgcagtggcacaatcttggctcactgcaaactccacctcccgggttcaagcaattctcctgcctcagcctcccgagtagctgggactaaaggtacgcgccaccatgcccagctaatttttatctttgtagagatggggtttcaccatgttggccaggatggtcttgatctcctaacctcgtgatccgcctgcctcagcctcccaaagtgctgggattacaggcgtgagccgccgcacctggcccttcacatctttattgttactacaataacaaatttcaggaagcatttttctaaaaactaaattccttaagaatggctctgctgggctccatcactcacacctgtaatcccagcactttgggaggccaaggcaggtggatcacgaggtcaaaagatcgagaccatcctggccaacgtggtgaaaccccatctctactaaaatacaaaaatcagctgggcaaagatcaagaccatcctggccaatgtggtgaaaacccgtctctactaaaatacaaaaatcagctgggcatggtggcacgcacctgtaatcccagctactcaggaggctgagtcaggagaatcgcttgaacctgggaggcggaggttgcagtgagctgggatcacaccactgcactccagcctggtaatagaacaagactctgtctcaaaaaaaaaaaaaaaaaaaaaaagatgggtcatggcattaacatctaagcacaattggtgagtacaggtctagagggagctataggaaggtggtttgttaacaagcactgacaaactctctcaataggatgccaaggaagtaaagacaccagaatctgccctcaatggatggatggacacagacaagggcacacacgcacccccagtacccacccttatgacactcacatacatatacacacaggaaattcctagcaaatcagcaagctctaagagatggaggaacagactgcacttgtaaatatgtatagacattgaaaaggactcctcaacttgctcccggtctcacctgagagtccacagagaagttgccagcggcaccgagggcattcaggaaaggttgcacatagcgccggacagccccctcaatgtcccagtagacatcatgggacttggggtctgggttgagtaaactgaaggtgatctcatagcctacagaaacaggagtcagggaagtcagaggctcttgtggatcaaagaagaggggcagcctgtactcccagctgagctgaacttgtttctcctctggaatggggctgctttccatcatggaaccaaaaggaggacaaaactgggatgaggaacactgagtaagaaaaagctgccgggcgctgtggctcatgtctgtaatcccagcactttgggagactgaggcagacggatcacttgaggccagcacttcaagaccagcctggccatcatggagaaaccccatctctactgaaaatacaaatatcggccgggtgtggtggctcacgctgtaatcccagcactttgggaggccgaggcaggcagatcatttgaggttgggatttcaagaccagcctggtcaacatggtgaaaccccgtctctactaaaaatacaaaaattagctaggcatggtggtgggcgcctgtaatcccaactattcaggaggctggggcaggggaatcgcttgaacctgggatgcggaggttgcagtgagacaagatcacgtcactgcactccagcctggacgacaggaggctccgtctcaaaaaaaaataaaataaaaataaaaatacaagaattagccagacatggtggcatgcacctgtaatcctactcaggaaactgaggagtgagaatcacttgaacgtgggaagcagaggttgtggtgagccaagatcacgccactgcactccagtctgggcaacagagcaagactctgtctcaaaaaataaaataaaataaataggccaggtgtggtggctcacacttgtaatcccagcactttgggaagccgaggcgggcagatcacgaggtcaggagatcgagaccatcctggctaacacagtgaaaccccgtctctactaaaaatacaaaaaaattagccaggagtggtggcgggcacctgtggtcccagctacttgggaggctgaggcaggagaatggcgtgaacccgggaggcggagcttgcagtgagccgagatagtgccactgcactcagcccaggcaacagagtgagactccgtctcaaaataaataactaaaaaaaataataataataataataacataaaataaataagaaaaaaattgagactagagaagaaaggagaaagaagttggcatgcagatttccctcctgccccatgtaattcatttcctctcccttcatgtggcagagcctggtgccctacccaagctggacttgagaggccgcctcttctcagcgctccacttgtcctctggaaggtggtcagccagagcagcagcaagcacatcctcagtcaaagacatggcctgggccacctggactatgcggcggccaatgatgttaaaggcctcccggtgcattatcccccgcaccactgctgtcctcttgggcccaatgtagctcatcatgtcctgtgggggtgagcaagagacagaatgcccatggctcagaaaagaaagccaaaaagcaccctggctcctactgttccgaatctgcccctttgccaatgaccaacaggtttgcacctctcttgagattcatgagctattaactcagcatttctgagctatgagtatatattgagtattttcatttgtctccgttctcttctttttcccagttgacatgggtccaggcagcatctaactcttcaggggctggtaaaatggtgaaatggaaactcagagatggcatgctgagcaagaaaagcggaataaacagacaactggagagtctgatataaaaatggcacatggcaaagaaacaagtattcataatagcattatttctaacagtaaaacctagaaataatccaaatgtccattagcaatagaatgggtaaattatgtttatgtttatacaatgatacatagattcaactacataattatggatgattctctcaccaggctctgccacatgaagggaataaaataaaagtggcagaggaacatgtgttataagccaccatttatataaattcaaaaatgtaaaattaaatacattgtttacagagatacagcatatgtgatcaaactctaaggaaaagcaagaaaattacaaacacaaaatctggttgccttgggccaaaagggaatggagtataaccatggaagtacacaccgtgctactgcactgcagtttgtgagctgggggtggggatggggacgttcattaacattttctttagtgcttttataaaaattaaatatttgattataaattttctttttgagacagagtctcactctgtcgcccaggctggagtgcagtggcactatcttggctcattgcaacctccacctcctgggttcaagtgattctcctgcctcagcctctcgagtagctgggactacaggcacccaccaccacgcccggctaatttttgtatttttagtagaaatggggtttcaccatgttgaccaggctggtctcaaactcctgacctcaagtgatccgcctgcctcggcctcccaaagtgctgggattacaggcatgtgccaccgcacccggccgattcttgtattgttagtagagatggggagtgcaatggcatgatattagctcactgcaacctccacctcccaggctcaagcgctccccctgcctcagcctccaaaagtaacagggactaccacatccagctaattttttttattttttgtagagatggggttttgccatgttgcccaggctggtcttgaacccctgagttcaagcaaactgcccgcctcggcctcccaaagtgctgggattacagtgtgagccaccagacccagccagcattctttattaaaaatatgtggaggacgggtgcggtggctcacgcctgtaatctcagcactctggggggccaaggcaggtagatcacaaggtcaggagttcgagaccagcctgaccaacgtggtgaaaccccatttctactaaaaatacattacatggcacatgcctgtaatcccaggtattcaggaggttgaggcaggagaatcacttgaacccgggaggcggaggctgcagtgagccgagatcccgccactgtactccagcctaggcaacagagcaagactccgtctcaaaaaaaaaaaaatttttttttggagagttttctgtagcaaatggaagaaatgggtagcaatgatgcaagaaggaggtgacccaggagtccacgagctgaagggataaggcaaagtcgcagcctctctgttaccttacctggggaagaagtgaggagtgttcagatatcacgtacacagtcagggagccctccgcttgttcctgaggctcatctaacatggcttctgcctctgggggcaagaacaggtggtacaccaagagcaaaacaccattccatctccccccagccccaaagaatgcctaacccaccccttcactcacattcagctgacacagtggtcaggcttgggtaagccaatcaacctctctggccctcagtggactgggctgaatcccacagttcctcattcccagcattccaagagaggttttggaagtaagccaaagcatgggaactatgcacttagagatcagaaggaaaaagagggcttcacattaaaatggtgtgctcatcccttcccataccttgcacactgcccgatgacagggcctcctcctcatggtccaaagccctccgataggccttctggaaacggcatttgattttcattttgtctgggagggataagaagtagcacaatgaaaagggcaagcatcatgcctctgcccaccttcccagacctaacactgtccagcatctgaggacagcaagatggctgtttacagaaaaagaccaagcagctgcagccaactctaatgatttctgcatagatgatatcaaacacatgacacccatttcgcccatctgccgcagctcttgccttcacctctgcacacactggtccttcagcgtgaaacgtcttcccactgggaaatctatttcaatagtcattacattaataggcaaaaggagaaaaactgtatggtcattccaatcactgccccaaaataattaaattcagtgaatgttcctgataaaaaacaaaatacacaggctgggcacggtggctcatgcttgtaatcccagcaatttgggaggccaaggcaggcggatcccttgatctcatgagttggagattagcctggacaacatgatgaaaccccaactctacaaaaaatacaaaaattagccaggtatgtgccagacatggtggctcacacctgtaatcccagcactttgggaggccaaggcgggtggatcacctgaggtcaggagtttgagaccagcctggccaacgtgatgaaaccccatctctaccaaaaatacaaaaaattagctgggtgtggtggcaggcgcctgtaatcccagctactcgggaagctcaggcaagagaatcacttgaacccagaaggcggaggctgcagtgagccgagatcacaccattgcactccagcctgggcaacaagagcgaaactccatctcaaaaaaaaaaaaaaaaaggcagttatggtggtgcacacctgtagtcccaactacttgggaggttgaggtgggaggatgacttgagcctgagaggcagaggttgcagtgacctgagatggcaccactgcactccagccagggtaatagaaccagaccttgtctcaaaaaaataaaaaataaaaaccacacacttaatgacaaaatattaaacataattctgtaaagttagtaataaaacaaggatgcctgctatctcctctattctcattgttattcagtattgttctttctaaagttcttgaccaatgtaatatgtgaagaaagagaaagaaaacttaaaagtattggaaagaaacagataaaatggccactttgaagtagcataattatttctcaagaaaatcagagaaccaactgaaaaactattagaactagcaacagttcaataagatgactagatacaaggatatgcaagaatcaatacccgcataaataccagcaatatccaattagaaacatcttttaaaacctcaatcacattaacaataaagtataaaaatacccaggaataaatgtataaaactataagaagaaaacttcaagactttactgaaggacataaaatatctgaacaaaatggaatagcatacaaggcccctagatgaatattataaagatgtcatattataaagactattataaagatgtcaactctccccaaattaatatatacatgtaaggcaatcctgaagggattttttttgcctcctgaaacttgacaagctaaacctaaaatttattgaaaaagttcctcttttctttataaaagaattccaggtcatacatttcttccagaaagaagaaatgacagaattgtaaaagtcactaatttggccaggtgtggtggctgatgcctgtaattccagcactttagggtccgaggtgggaagattgcttaagcctaggagtttgagaccagctcggggaacacagtgagaccccgtctctacaaaaaatttaaaaactagctggggccaggtgcactggctcacgcttgtaatcccagcactttaggaggccaagacaggcggactgctcgaggccaggagttcaagaccagcctggccaccatggtgaaaccccgtttctactaaaattacaaaaattagccaggcatggtgtctgtgcacttgtagtcctagctactcaggaggctgaggcaggagaatcacttgaacccgggaggcggacgatgcagtgagctgagattgcgccactgcactccagcctgggtgacagagtgagactctgtctcaaaataaataaataaataaacaaattaaataaaataaataaaaaattagctgggcacagtggcacattcttgtagtctcagctacttgggagcttgagagcttgaggtaagaggaccacttgaacccaggagttcaaggttacagtgagctatgattgggccactgcacttcagcctgagtgtcagaccctatctcaaaaaaaaaaaaaaaaaaaggaccccttgtctactttttcttttctttttttttttttttttgtttttttgggtttttttttgagatggaatctggctctgttgcccagactggagaataacagtgggatcccggctcactgcaacatccgcctccccatttcaagcaattctcctacctcagccttccaagtagctgggattacaggcatgtgccaccacacccagctaatttttgtatttttagtagagacagggttttcccatgttgagcaggctggtcttgaactcctgaccttaagtgatttacccgcctcagcctcccaaagtgctgggattacaggcgtgagccaccgcgcccagcctacttttttttttttttttttgagacagagtctcgttctgtctcccaggctggaatgcagtggcacaatcttggctcaatgaaacctctgcctcctaggttcaagcaattctcctgtcttggactccagagtagctgggactacaggcacacaccaccacacccagcgaatttgtgtatgtttagtggagaaggggtttcactacattgcccaggctggtctgaaactcctgacctcaaatgatccaccgccttggcctcccaaagttctgggattacaggcgtgagccactgtgcctggccacacaccagtagtcctacctacttgggaggctgaggtgggaggtctgattgagcctaggatttcaaggctgcagtaagctatgattgagccactgcacagcagtctgggtgacagagtgagaccctgtctctaaaaaaaataaaaattaaaaaaagcattatcttgtgactgctaatgaaatggattccatgatcaaatagatgctaaaaatatgtaaaaggttgatgagaaactctaaaatatagagatcaggctgacaatacctgaactcactacataatctttgcatcacccaaaatggaacaactagccattaagtgcttcaggatacaacacaataggaagtacactgcaccacctacaatgtattctcatccaaaaaattgaacctggctttaatcaaaccactagatctaactcccagtttataaggaatatggatgctagaggaatgagttaaattaaactgtgaggaagctactcgccaaatcccaaatgtgagatgttctataaaacaaatgacctggtttctccaacaaatcaatggtgtgaaagaaatgtatgggggtagggtggggggagctgacataaaataaaagtgacaaaaagacaaatgcaacttattgatcctgatggaataaaccatctgtgaaaggataccttggagataactggagagatctaaatacagactgagaattaggtgatattaaggaatcactgctaacttagttaggtgtgacaatggtagtcatgtttaaaaaaagaaacaaaaaaccttcaatggcttcccttcttatctagaataaaagcctagaatgcaaattctcacagtgatctaccaggccctaagtgattcagcccccttctactgttctggttttatttcatttcctctttctctcttcctcattcactccagtgaagccacaaggagattctcactgctcctgaaaggtacaacacttgctcttaactcgggaccttagacatgcttttccctctgccaagatgctcttcccccagatatctgcacagtctattccctcgccttttaggtatttactcgaatgtcctcttttcaatgagacctcccttgtccaccctatctaaaactgcaatcccctcccattcctcaagaaaattccctctcctcctgtcctgctctatttttcttctgtcaccatctaacatacatttgacttacttgtctttttttctttttttttttgagatggagtctttgtcacccaggctggagtgcagtggtgggatcttggctcactgcaacttccacctcacaggttcaagcgattctcctgcctcagcctcccaagtagctgggattacaggcgcccgccaccacgcccggctaatttttgtatttttagtagagatggggtttcaccatgttagccgggctggtctcaaactcctgatctcaagtgatctgcctgcctcggcctcccaaagtgctgggattacaggtgtgagctaccacatccagctttgtcttttttattgtcttcttcttgtctgttttgttcactgctatatctctagtaactagaactgtatctgacatagctacaaagtaaatacttgttgaataaatgaacaacgctattactatttccgtctaacagatgaggaaaccaaggtttagagaagttaacaaccttactcaaatttacacaaataagtggcagaataaggcttgaattccagctctctgatcccagattctatactcttggtcaccctttatacgtgttgcctatactatacgtttacagtatacccatattactgaacactgtgttatcaaatatgaagaaatccatgataaactgaaaacaatcaaatttcaaactaacttgtgagggatagtccaatttttgtttagaaaacaagaagtttggctgggcatggtggctcacgcctgtaatcccagcactttgggaggccgaggctggtggatcactggaggtcaggagtttgagaccagcctagccaacatggtgaaaccccgtatctactaaaaatgcaaaaaattagctgggcgtggtggcaggcgcctgtaatcccagctacttcagaggctgagccagaagaatcgtttgaacccaggaggcagaggttgcagtgagccaaaatcgtgccattgcgctccagcctgggcaacaagagcgaaactccatctcaaaaaaaaaaaaaaaaaagaaagaaaaccagaagtttgtgtgtgtacagaggctgaaccatacgaaatatcatttttttaaaaaaatgttttaaccagccgggtgcggtggctcacacttgtaatcccagcactttgggaggctgatcacttgagcccaggagctcgagaccagcctgggcaacatggcgaaaccctatctctactaaaaataccaaaacaaatcagctgggtgtgatggtgtgcggctgtagtcccagctattaaggcaggtgggctgagatgggaggatcgcttgagcccaataggtcaaggctgcagtgggccctgatcgtgccaccatactccagcctgggcaacaaagagagaccctttctcaaaaaaaaaaaaaaaaaagaaaagaaaagttttcaccaaggctaaagaactaaaaaagtaaatggcacacagatgcctcatgctctagactcagcccaaatctccagtcattcccagtctttcactacacattccagtaaggcaaaactgctcataggtcccccaatatgctgattcaccccgccacactttcacacaggagtatagtttgttggttaaaagcttgaacactggaatcagtcaggcctggatttaaatcccagttccatctcttactagctgtgtgaccttgcacaagttaaattctctaaggctcagtttcttcatttataaaatggggatcatatcattagaaaggattaaatgaggcaacacatataaaatgcttcacctagtttctggcacacagcgagcaacaactatcagctatccttatactgtctcatgctattaactttgcctgaaattctctccctccttttcccacttaacctgaattcctacacatcctttaaaaatccgacttaagaattacatctctcaaaactttctctgcctttctttcctcccagatggttaatactctttactaagtgcaatctctgtttcttgtatacttctactgtaatttattttatctttctcccctacctatgaacatcttgaaaccattatcaatttcttattcattcctaaattcttggtacctaaaaaaaagtaccccagtaaagtgtttaatgttaaactgaataggggctgggcgcggtggctcacgcctgtaatcccaacactttgggaggctgaggcatgcggatcacctgaagtcaggagttcgagagcagcatggccaacatggcataaccccgtctctactaaaaatacaaaaattagctgggcgtagtgtcgcgcgcctgtaatcccagctactcgggtggctggtgcagaagaatcgcttgaacccaggaggcagaggttgcagtgagccaagatggcgccactgcactccagcctgggcgacagagcgaagctccgtctcaaaatataataaataaataaacaaacaaactaaatagggcctatatgcaaatccaatttaatttcaaactctgtgttctttccactatatcccacctcttcccctataccctgatgggcatcaactgcttccgattaggtagcctgtcttacgagtaaaattgctatttagtgactgtgaatttgaaagtagtttttttctgaccaaacacactgttcattcagaggtctttcaacagtaagtttttaactgcgtttatggtacacccccgctcctcccacccaactcagctctgaactgagctcagaggcgaaaagcagccctgatccccagtaactcacatttcagaggaatctctctttcatgcacaacggtgaagggcagcttctcctggtcgtccaggggcactgactcccgcgtaaacacgacagtgacaggcaccatgaggcggagctacaggaaggagcatcagggccgtcactgagtctccaccttgccgggggggctgtcccccgaccctcccgcacagcagtctcacctgaagggcattcaggccactgatctgggagtaaggcaacgaggcccggtaggtctccgtggtcttccaccagagcggtagccccagcacgatggccaccgcagcgaagaagagggcggcgcgcttgccccgggccacctctgagggcatggggaaccgactgaggcgctggaaacgggctagggtaccggccccatccccgacgcggagaagccccaaccaccggcctccaggggcccgcgttcattgggatctccgtgcgaagggacccggcccaagcctgaagggaatctcgtctgaagagacccccgagccccccgtccgcgggacctctcgcacaccacaatccccacccctgctattcctcccttgccatcagctagctgcaggccccccacccgaagcccaccgcacctaggtgtgtagccgcagccccggcggccgccatgctagcttccggctgctccggccaccgtgggggcagagcttcgtgagcctcacccaatcggaatctctgcaacgagggggcaggaccgcggcggtgatcggggccaatcgcgagcgctactccagacccgcagacgggagcaagcgggcgaggggtgggagggctccgctgggagcttcgctggggatctgaaaggaagtcacccgggcgcggagggacagcctaggggccgtgcgggtttcggcgctgctggaacgaagttccccgcttccctgtagaacacacttctagccccgcaatcaagagcgcaacctctgcagtccttaaatactagctgggcaactacaggcagctccgaggctcatctgaaaatggagatatttacataaatgaggccgttcttgtaaggagcctggcacacggaaagccctcaacgtcaactgtcacggtcttattatccttatcgtagaactcctcttagggtgccctctcctcaaagcctcaaacacggaggtagcaagctagtatgttttagcacaattggctctctcgctattttaaaatacgttttaattcatttccaacttggaaaactcagaatacttcacttaaaaatcttgaaaagtcatgagcccagactctagatgctgatcactgcggttcaaatcctggcttcatcacttattaggtgagtgatcgtgagaagatcgttctgtgcctatctgtgcctgttttctctattaaaatagggatgatagtaatagtacctactttatagagttgtatgaaatgtgtcagtacatataaagtgattagaacagggttggtgctatgtgcaagctatttttgttattataaagtcaggccacacagggtggagcatttgtagcctccccagttgacacagaacacacgcagcttgttatctcttctttttatctgcttagacccaggttctcagcctacctcacaacccagcccagtggttaaagttcagcatcaggcctcaccagagctgtccttacccagaccctccaattggctccctttgtgcccacttctaccccaaatgaaaatgggccatagcccttggcaacctcctagatgccctgctcagccctggcagcccgcagagccttggttttcctctttgggcgggagtccaggtgctcgcttgcccttactggtgtggctcaccctagtggaaggtaccaggtcccagctgggcttaacactgcgagatgggagagactcccacccactcttatcccagcctgtcttgctgcctccctgctttgagccttgcacaaatctgccttcaggagttgccagtttggcctcactccatacttctgtagctgcagcccagtgccactgatgtggcagtccctagaagacttgcagtcttcctcattgccccactccagacttggacatcaagagagcaagagcctgagctggggatggtgactgcatgtgcccttcctccataacttgaagcccagtaagactcaaatcccaccctctccacctccagagtcagagggcccagagatagaattagcagagatcagaaactgggaggtgggaatttgatgtgtaaaacagacaggcaaagtagaatgttttgctaccatttatttgctgtatggtatgtactcaaggcatgagtcagggcttctgtactaccctctgatcccaggagacagggcaggcaagaaggagagcccagggagaagctacctcatcatgggaaaattgtgggagctggaagaggtagggggagacccagccatcctgttctgacttctagcaatttcttctgccctcagtcatgaggggctccctatcctcccatcctatggtcccaggtgcagcaatgagagaggggaagggaagagagaaaggaagacaagttggtgccaggtgaaggcatctctgctctgcatagctatttggccctggccatgactacaagcaaaagtgggtgcagatggctgggccaagggctgtggtatggagtggatactcagtaggcatggttggcaatgtagagtgactgtgctgctgctccaccatcttctccactgccttcatacttgccctgggctgcaagcccattcacctgcaaaagggagcgtggagtaagcaggctgagccagcccacaggtgccaagccctgcccaggctatagcctctgggtgctgcccccacccaccaccacctgtagctcccaacctcagcccgcttgatgaactcctcagtggcagccccagcattgtcccgttgccctcgccaggcattgagtgcagaggcttgcagggcacgcccataggagaaggtaagcgcccagggtcggggaagggggcagcggttgatggcattgaggttgaatgatgcctcttcttcgctctgacccccagacaggaaggtcactcctagtgtggaggagagaagacaaactgactggtcactcccaatttttccaggatagggaacccctgaaggccacaagaaggacctgaagatgggccttagggataggagcaggttagggagctgggtagtacctgggacagctgggggcacagtgcgacgcagggcagtgacagttgccatggcaatctcctctggggtatacttgatgggacaggcatggcccggggtcaccatgttgggcttgagcagggtcccctccaggtatacatgatggtcactcagggccttgtacacagcagccaagacctgggtggggattagaggaggtttactaagggtctgggcccccactggttactgctcgatgctccctatgtaggggtagatgggcacagactgtgagggctcagtacaggctcagatcacaggcctgtgccgggatgaagtgaaaaagtgctaggggaaagtgtgcctggatctaagctgggggttctggggaacagacactcctgccgagctgtccctgcagtatgtttgtgtgcccaggtgtggactcaccttctctgtaacatactgacaacgtttgaggtcgtggtctccatcaggcaatatttcaggttccacaataggcacaatgccattctgcaggcaagagcagagatgcttgggaggggcagtaggggagatgaagaaagccttgtgactctctccccaccaggcatacagggcacctagctcaccaccctcccaacacacacacctgctggcagatactggcataacgggccagcacgttggcgttctccagaatggcaagtgcagagggtgtacgctcactgattttcagcacacagcgccacttggcaaagtcagcaccatccttcttgtattgggcacagcgttctgagagcccatccagccctgcaagcacagtgccaacctcattactctgcccctcttttaccagcatcaactatctaacacctctttggtcctcaagcccacccatcctataccttgagtggtggtttctccatcagtcccagctagaggcaccacacccttgtcaacctgtagaggaagtacaagcagagggttgaatccaggcaggattctccttgctacccctcctacacaagcttattttcacacccagcttccattcagagcagggccaggggctgcaccttgatgcccacgacgatgcccttatcctggatggttcggacgaagggaacaccattatcatctttctggtagagggtctcatggaagaaaatgacgcctccaatgcactttttcacacggtcatcagcactgaacaggacctggcggtacagccggcggttctcctctgtgttttccaccccaatttggctcagccgcttggccatgctgcctaggggcaaacaaagagaggcagtgagaacatccccagggtcccctagccacctgtaccctacctggctacagatgtccacttacctacagactcatccgcagccagaatgcctttgcccggggctacaatccgcagggcaatgtcagacaactccttcttctgctcagcagaaagggctgggtacgagtgaggcatggtgacagctccctggagtggagacaagataaaaaagccagacctcaccctctgctgcctctcctggccagatgggccaaatggcctccccatcaagcaaggggctgggaacagggcagcagtccttggcatgagtcctgggcatcaagtggcaccagtccttctgacagctagcaagcttagggctccagttcccacatctccttttgtccctggtaggcatccttcccagccctggggaaagatgcagggtgggggtggggaggtgagcagccctgaagccacagctcttctgataaatctgctgcccaatcaaggatgccaacccttctttcactgaacttggtcccttgttgaggtaggcaaaagtcctggcctttccagcttcccttttctcatcctccacaggacccctagggaaagtgtacttacttccaaggcttcagaatgaggcaaaagtacttattgccaccctcttctctcagcttctagaggaaaaggttggaagaacaggtagggagtaggagtggcacaaataccagtcacaggctcctgcagcttctccttttctgtactccaaacctgcctgcctatgcctattgcctattcccacccagtaccagaggttggccccagtggggctgcagtgatgtaggaaagagggcccagcgggtcagctgtgttagtgtgtggagactagggctagtgacacctccgggtcatctctgtgcccaggaagcacttcacctgtttggcaggaggatagcaataggaagcacttcaattccccacaactcagacacccagacgggagggcagaggaccaaggctgaaaggagtagagagcctgagagagagatgagactgaggggagctagtggtgatgcaggctaaccagtcagcgggagagacctagaccggggggcagagaaggcgggagaactggagagaggacctagcctaggaggagagggagcaggctgagaaggaaatgctctgggtaggagagacagactccaaggaaaaatccaacaagtagaggaggatttgggattggaaaagctgaggtccagctgggagagctgaagagggatagaacagaagaggttgagccatggggtttcaagtacgcggaaaggagcaaagatgttaggaaagggtcgaaagggcacatcccggagtcccaggtagcaggacgaggatggcaggggaagagccaaggaaatgaagcggagatgttgagtggctcccgccttgcctggccttacctgtgcgcagccagttagcagccgcagccacaagcacagctcgggttctgatccgcaaacagatgaggctgcagccctggctccctctggtaaatgaggctgcggatgtcgcagagctacgtgactcctccgggggcgtggcctgcatgccccgccctgaccacaccccctccccaggactggtgtccggggcaagaccacgccctcagaggcggggcggcgaggtggagtgagcgccccgccaggcatccgtggctgttagggactgccctcccacctcggggagcctggccatgaccttgcgttcatttctgccacaatccctttaccacgtgccgggcacttgctggatgctggggattaagcttagtctggtgaagaggaggcaccagaacagtaacaacaggttgagtaggtggggcagaagcatcttcaaggtgcccaagttcagggcaggaagtaatgaactgagcttctctgtcctcacccccatatttgccagggtatacccccgagggggctggggaaagtaagagaatgaagcctttctgtttcctccaggcggtgagccagggaacaagcagtccagtgcccagagttttggtgaaagcagaggaagggaggaagggcaggcagccttggctttggatgcagcaggaggtggagagggatctatggagggtgcccaggcaggaggcccaagctgcttcttccctgacttcatcatccgccccctctcacccaaaaagtaagattccgtaagcttggagaaattcattaaatacactttatttaaatagcatttatctcagttggctctatgccagttggtcttggtattggggtaagggggtattgcaggtaaaaagaggtgaagcagattctggctttcagtttcttagctcagaaattccagcaatccctgtagttctttgcatcccctcaccacctctggaatagagagcagggtctgggaagagaggcagaaaacgcagctcaggaccacagacttaaggcccagggctcccagccccaggaggcagccgctgaattagaggggagaaaacagacaccacagagaagcctgcaatagtgattcaggcccagctctcagcacaggctgggaaccagatctgtgctcattagtacctcctggggccaggccttgtaccaggttcattagtgatatcacctccctcctgcctataccttataaatatgctgaacaatgtcatctagtttttctaactccttgtcagagcgccgaaggttctcctctaggatatttctctagaaagcaaacagattttataagtcctatgcataaaagagcaaacttggtaggacaggggaaacatggcggggcatttgttaacgatggtaggaaatggccctggaatggcatggacattcttacatggctctggaacttgatcatgagtttttccttctcatttttcatctccaggaacatcactctcagtttgtccacctagaaatatgtccagatcaacaggggtacagcctggggtccccacctgctgtccagctcctctgttaactctgagtcacctcctgagagagccacactttctcctggatccaattggtggccataggctggcagttggagtccagctggcctgccagggcctcctggagcactttggtctctgtctccgcacgccgaagtgagcgggtaaggtgggtcacctcctctctaaggctctgggaatgagaatggagaggtgtccaataggacataaggatagacaacatgtggtgaacaaaagcaaaccatttctcatacttgggatcctggctgaccagtaacacagaaggcaaaggcctgggcatgatggtgaacatactatgagctcgccactcttgtctatctgttctaggatcttctcattctgctgctgtatcacttcctggagctccttttcattctgtgagggaaagggaggtgagaagacacatgaagagctggtctcttcacagcccttgccaggaggtaggagagagtgcctgacccatgcttagcccacatgggaccaattgatatcacgccaattctttccccagggccaagccaggcaaggcacatttcagtgttgggagagctctgctagagttcctgacttctctcctgagtcagcctgggaagacaggtcagcccatagctgacatgtgaaatgtctgaccccaggaagggcaaaactagggcagtggttggaaaatccccaccacccagattcctggagagataatggctcccagtgggccagtagagctgccccagttcttcatcgccccacttctaggtccctccttcaccttgtagcgcaagcacaaggcctggttcagcttctctatgtctgcttcttttgccttctggacttcctgatgctgttcttcctgggcctgcagcctagcttgcagctcacaactgaaggaaggaagaatttagcaacattcctgtcctctcagggatcagttggacccttggcataagaggatgtctcactgtccctctgtcaccaaaactgcatcccactcacatttttcgctgcagagtcctgatggcttcttctttagactcttgtagcagggaacaaagactctgaagctcagtagtcataatactcatttctgccaggctctcctccatgcctggggtctctgaaagagaaagtcccagatagaggtctagccttccagccctggaaggaaggagtgtatagccatcatttccacaactcttatccgtgttccccacccacaggatttgaatgtctggaacattacagatcccagaaggcagaaataaaatgagcccaagtagaattgaggtttttagagcaaagcacttctcactgctttcgtctttactcatcaccaccagattttctagaaatgaggcaggatccctggagcccctcctaacctgcgggctgaagggaaaccattgatgctactcgggtgaaagcactcttgtcacttccaagcaagggcacaggagttgattctggctctaagagaaaaaccaataatgggagagggcccctctgatgatccaggcaggggtctaccataatggaagccagggtaagatagacaagcccgctggtggacatcttcaacagcagaagatatcaggagcagcgtcacaactttcccacccccaaatcccagggcctttaaccttcatctgccactgctgtcaagatgcttcccaggaaggtcctgtcattaggcagagggtgttcctgggtgggaggacaggctgtactcagcagaagggtctcttgttcagtctaagggcaaagaagaaaaaatagctgctgttcaggtctagtgaactcctgggcttccaggtaactcccagccatctcctccaaaatgctgttccacctattatctcaattctctatcttcaacttctccattagtgcctttctctgaacatgtttatattcttaagcctctccaacaaaaacagcagtattttaaaaacaaacctaaacaaaacaaaacaaaacccttcttcttaccttaaatccccttttagctactgccttttctagaaagaaaggaaagaaagaaaaaagaaagaaaaaaagagcctatacttcttgtttataactctcaccatctattgactccccagcccactacactcaggcttctcccctgtcattccacctaaattcttgtcatttggttcaccaatggcagccttactttcaaatgcaatgcatatatttcagctcttgttttacctgacctatttgatattgatgaccacattgttcttttagaaacttccttttcttagcttccaggacatgagtctctctcctttaaaggcaggccccacacctttctggttatttcttctctattcacaggtccttccttaactgctggatcctctgggttaagtccttggccctaaatttactctaattcattcccagggtggccttgccttgggagcatcacaaaaacatctacttcaaacttcccttccacatgaatgactcttccatccctctctcaactttttcccagtctttttcccagtctgcagactcaaaggctaactgcctgtgaagaatctaccagaaggttccacagtcaatctgtcaacttagtatgtatgaagctgagttcaccattttccctgtgccctgatagggaacaccctatcaaaagtctgttcctactcctgtatttactattctagagcagggagagggaaggctagcaaattgtggcctacaggtcaaatctagcctgccaactatttttgtaaataaagttttattggaacacagccagacccattaatggctgtatcatctatggctgctcttgaactacaaaggcagaattgagtagttgagacagagaccatatggcccaaaaagccaaaaatacttattatatggccatttataggaaaagcttgctggcctcagtcctgaagtagctgtgcttgtggctgcggctgctaactggctgcgcacaggtaaggccaggcaaggcgggagccactcaacatctccgcttcatttccttggctcttcccctgccatcctcgtcctgctacctgggactccgggatgtgccctttcgaccctttcctaacatctttgctcctttccgcgtacttgaaaccccatggctcaacctcttctgttctatccctcttcagctctcccagctggacctcagcttttccaatcccaaatcctcctctacttgttggatttttccttggagtctgtctctcctacccagagcatttccttctcagcctgctccctctcctcctaggctaggtcctctctccagttctcccgccttctctgccccccggtctaggtctctcccgctgactggttagcctgagtcaccactagctcccctcagtctcatctctctctcaggctctctactcctttcagccttggtcctctgccctcccgtctgggtgtctgagttgtggggaattgaagtgcttcctattgctatccctcctgccacacaggttgaagtgcttcctgggcacagagctgacccggaggtgtcactagccctagtctccacacactaacacagctgacccgctgggccctctttcctagcaatctaaggatcatcattcactcttctaacttactctcacatcaaattggtcactcttacatcaaattggttctactgcctctgcttcctaaatatctattgaatccattcactccatcctctcctttctactgcctataaaactgccattatttcaagccttcaaaatctggcctcctgcctacttctccagtgttgtctcctgccttgccccacagagctctcacgctgcagccatgaagagctgcttcccattcctcagacttgctgcattccatatgagcagcatcttgccttgttcatcctctagtcccagcacctaacccaggttttataaggtagacactataaaaaagaacacatcatgtactatgtgcatgactttctacgtacgactctcatatgtagtcagatgaaactttcatacaccgttccctctgcctagtgggacttcctaaataccctcccctgccccacaaacgtctaaacctcaagactgtacccaaggtcagctgctttgagaaggcatcctaattctcgaaggctgaagtggtgctcccctctctatctctcacagtggtccatgcagacctctaccatgatcataagtcaagatgacaagtttacatctgtttgtcttccatgctaaactgtagatttgatggcatttcctgtgctcggtacccagttggggaagaggatcaggtcataagcaattgccagattttaggatatttgttgtgccttatctgctgaataagctaattacctttgtattctgaatgatgtcaaccatttattgtttagtgcacactgcagggaggccaaagaaggctatatttctgctttcttgaaacatagtctggttgaagagaccaggtatccaaggaaaattaatacaaatacaaaagaagagtaagttcatgagaaatatggcagaagaaaagatcaccgggtccacatgatttgatttgggaacagttcaaagaaggtaaaccagggaagatttctttttttgtgggggaaagggtttcactctcacccagtttggagtgcagtgatacaaaaaaattagccaggtatgatcatggctcactgcagcctcaacttcccaggctcaggtgatcctctcacctcagcctcccagatagctgggactacaggttcacaacactacacctgggctaatttctgtatttttttgtagagatggttttcaccacgttgcccaggtcggaagggaggattttaatagaaaaggcatttccagtttgaagaaagaatagaatgaatgtgggaacagccagagtctgggttctggggataaaaatggggacatgtgtgtagcatacaggcagtctagctggggcaaagtgttcataatagggagataggagacaggggaagaaaggtttgagcaacaggctaatgaggtcctgtaggtaactgaaatcataaaaggtcacagttagaaaaagagtaatgttttaggaagactatctgtaaaataaagatacaattggaagagaagagaaggaaccccaggatcctaccttctcctttagttttgtctgtagaaagagagtcaggctctgtagttgctcagtcagcagccctagcttttgagagtactgccgtgttttctccagatcttgctcctggttatctgctatggtgctggccagtttagccctgaaataaggaacagggaagatgaccaaagaccaaattaccttctctgaacgcctatcccaaatccccacagagctgcattaaaggagagaaacaagaggctcaacactcacagttctcttcttggagattttggcttctagaagtgttcctgagaaaaaaataagcacttagggggaagtacagaaagttagagaacttacgttaggttctctacagtgtccttgaggttctcacactgcaagctgcgctcccggagcacttccagtgtggttttcaattgacactcaacctgacccagctccaggtgagcaacctgattctcctggtctgcaaactgggaagacaagagaaggagcaagacagggagggagaattttagtgccctgggtacagaggctttttctagttcacagtctcaaaccttacctcaacactatcaggcaagaatcacactcctgaggcttaccagctcccttggcccaagccatattccttacctccaaggtctctttcaggtcccgcacctctttggccaggacagcttgttgctgctgcagttctgcctgcatgtgttttagtgccatctcttccttttgccatctgccagagacaacatattagatcccatttggtcctaaatcctggatgcctactgccacagtaccccgttaggaactcactgagcagcctgctcctcattgctctgggtaagctggcagagtaactcatccttcatagccaggtcctgggcacaatgggtatgctgactctgtagctcttttagctggctgtccatgttggccagaatctgcaactgagcccggagatctagaacaaaagtatcctaatgacaccatgcggtcagcaggctagaaactccccaaacttctgctccaaagcaagtgctcctgagtacttccttgctctagtgccacactccaagccttaacagggctcaaatgcttacatgcatgcatacacacacacacacacaaacacctgttgctagacgactgttttccaactccagttgttctgtttggcctttgcactcctctaactgggcagagacttgttccagcaccctagaaacctaggaagaacagatggttttcctcctatagttcctcctgaatcaataatcccaggacttggtccagcttctctttctggacaagacagaaaactaccttgctcctgggcatcaacattgcagaaaataaggttgatcctcaggaaaaagtagagacaggagaaaagttgctgaagtaaagatgctgaagggcaaaggaaaaaactgcgcttaaggccatcttacagctaagagaccttactggctggcctccaaacccacagggtgaaaagaaaacagatccagggtaagaggctaatggtatcacacattaggaaggaaaccaagcctaagcagtccccactcttggtttgtacctcctgcttttcctcaattgccacatcacgttcctgcagggcttgctggctcttgactgtgagtttctctgtgagttgtcgggaccgactcagcaaagctgtccatgttgtatactaccaggggaagcaagcaggtcagtagagcacacttgaggcaaagctcacaacaggacttgatgtgagtaaggaattagttatgatggtcccaaatactcacatccagttgcatggacctccagtcttgttgcaaggtagaagtaagactcactgtctgctgaaccagctcttcttgcttggcatgaagccctacctacaaaagaaagattgcctaggcgggaaccccttccctttggatacagcaaagtgggagtatgcaactaccctcccagtctgtcagcacagaccccaggaaagaaaatgcccttaaattaccagttgggtctgggcatccttcagaaggcctctgaattcccgcatggatgctaggtcctgttccagctggctgatgcgctggctggcgtgtgcacagaaagcctccaacactatctctgcctattgagggaagtggttgcaaggccacagtgggcaacaggggagccagcacaaaaagatgtaaccatgacacctcaatagatcagttctttactgcccagggcaggcagttcttaggccacccatctgtgtctaaagtgcatttgtgttcctgcaggaaccttgaggtggaaacctcccacatccaagaacaaatgcctgtcaccttaccgcatccttgcctctgagagccatttcctctctgtgccttgcctcctccctttctgctttgaggctctggagctttgccctcaatttcttcagcaaatcaaaacagcaacagaccaatgtttctgcacgccgagactatatggtaagaatcagttaatgtgtctggttcctctttatggcttttagtcccaccacaggcctccacctccatcttcaggctgcttacctcctgactcacagtagtcttatcttcttctaaatgcaacagggataggtgaagcaaggatatcagctctttagagataagcacccatgattgctgtagagaaaaaaatgggtaggtgagatcaaataaagtcactaagcaggaaacaggggcactggggaggaaaaccgctaaccccaattccaagctccgcataaggagatgtactttacaaatgtttggaaacctcccttcaccaccacgacttagtatcaccatctactaaccacccaggattctccattcttcatcttcacaggagacccagtggtggtgtaaggtcaatcatcacttaccatgacatttctggcctgctgtagggcctgtcccatctcatggctctccttaagatgctgaagtttattagttatctagccagaaaaacagagttgttccttgttttgtttgtttgtttgtttttgagacagagtcttgctctatcatccagactggagtgcagtggcacaatctcagctcactgcaacctccacctcccaggttcaagcaattctcatgcctcagcctcccaagtagctgggattacaggcatgcactaccacacccagctaatttgtatatttttagtagagtcggggtttcaccatgttggccaggctggtcttgaactcctggcctcaagtgatccaccgactcggcctcccaaagtgctgggattacaggggtgagccaccatgaccagccaagttgttccttttgagtaggcaacatgtaccaccagcacctcattcttcctcccacccagtgagttataggagcctttcctattttatttattttttattttctgtagagatgaggtcttgctatgttgccctggctggtctcaaactcctggcctcaaacagtcctcctgcctcggacttccaaagtgctcctgccacacccagccacctttcctattaaaagcagaagcaaagtactcaattcaatgaagccaagtcagaaagaaaaatccacaggtaggtaaaaaatttctttgtttagccaggcacagtgactcatgcctgtaatcccagcaccttcagaggctgaggcaggaggatcacttgggtccgggagttcaagaccagcctgggcaacacagtgaaaccccatctctaaaaaaaaaaaaaaaaggctgggcgcggtggcgcacacctgtaatcccagcactttgggaggtcaaggcgggcggatcacctgaggtcgggagttcgagaccagcctgaccaacatggagaaaccccatgtctactaaaactacaaaattagccaggcgtggtggcacgtgcctgtaatcccagctactccggaggctgaggcaggagaatcacttgaaaccgggaggcaaggttgcagtgagccgagattacgccactgcaccccagcctgggcaacaagagtaaaactccgtctcaaaaaaaaaaaattttttttcattagccaggcatggtggcacatgcctatattcccagctactcagctggattgaggtgggaggatcccttgagcccaggaggtagaggctgcagtgagccatgttcgtgccactgcactccagtgtgggtaacagagtgagacctcgtctcaaaaaaaaaaaaaaaaaaaaaaaggatgaaccaatttatatcctgcagataaatagagtatgcttaccagcattacctattttattctttgctattgagtcacaagaaaatggcatctcactgttcaatttgcattttttattgccaataatgctaaccttcttaggtatttattcatcatttttactttcttaattgtctgctcattatcctgggtcagatagataaaactcatagtatgcatagagtaagtaggtatgatctcaaaggcagtagaaccccagaagacaagttctaagagaaaagtgggagtcttcattactgaggcaaggcagccatcatctgggggaaaagttactactggagcagcactgctgatttcttggagttcatggctcccttccccagcaaagcagttatcattcactgctgcatcgtgaaataaggcacagagtagcacatgagcttggatagggctcacatcgtgctcagctggacagtcaggcaggtgatgagattaatgtgaaggaggcagccaggcagcaaggacatggcatgctgatggagaatggctaaaggtatgtcatttcccctctttggttctgcttcagtggcctacaaagggacctggcaaccttcaggggaagaggatgcatggcagattcagggatgggaaacaaggtcaagaacaagaggaaaggacacaaagataagaaaacaggagggaaattgaacagctggaggaacatggagcttatggtttccaggatttttggcaaatggtaaggtcattactttgaggatattttcaactcaaaggaggtctctgcacatttggggaccatctcttcttagcagcagccacctattatctcaacagccacaatggtgaggtgctatcaattccttcacctgccaccattcccttccttcttaggcctgtgttgtaatacaatcctctagaacattgttgttgttgttgtttgagacagcctcactctgttgcccaggctagagtacactgggtgatctcggctcactgcaacctctacctcctaggttcaagcaattctcatgcctcagccacccaagtagctgggattacaggagtgcactaccatacccagctaacttttgtatttttaatagagatggggtttcactatgttagccaggctggtctcaaactcctggcctcaagtgatctgccggcctcagcctcccaaagtgctgggattataagcgtgagccaccacattgggccaacagtggtcttttagctactttcctctaatatttcctgcaaaaactaagtacccttaagtttaaattgttgcaaaggctgtaatgtccagcatattaccaatattgacaatttaaaataattttttttttttttgagacagagtcttactctatcctccaggctggagtgcagtggcgcgatcttggctcactgcaacctctgcctcccgggttcaagcgattctcatgcctcagcctcccaagtagctggaattacaggtgccctccaccacacccagctaatttttgtatttttagtaaagacggggtttcgccatgttggccaggctggtcttgaactcctgacctcaggtgatcctcccgcctcggcctcccaaagtgttgggattacaggtatgagccaccatgcccagcctaaaataaaattattagattactcttaaatatatccagtggcataaatactacatacaccaaaatgatgagatacctagttgctatcttttaaaaatacaagaaaaagctcttcttagcagtcagaaattttattatgtcatccctttttctctttgaacatatattttttatttttctcagaatttcagcctaatgtaatatatttttatgctttaaagtatgttattagctgggcacagtggctcacacctgtaatcccagtgctttgggaggcaaaggctagcagatcacttgagcccaggggtttgagaacagcctggccaacatagcaaaaccccatctctactaaaaatacaaaaaaattaggtaggtgtggtggcatacacctacagtcctagctacccaggaggctgaggtgggaggatcacctgagccaaggaagctgaggcttcagtgagccctgatcgcaacatggtactctagcctgggtgacagaccaagaaactatctcaaaaaataaaaataaaatctgttattaaccatcatctctgcaacaacaatgaaagttcatctaaatttaaattaaaatttcctttaaattcctttgaccggaaggctttaaagtgaaaaagctttctttaggatagagaaatcttttaatcagttgtatattagtcactgtaatataatttctaataaaataaacatgctcggcaaaatttaattgggaatcacctattaatgaaatcgatggagattccttccccttattagttcgtatatctgtggattactataattccagcaataagaaatagttcagcaacaattcgtgactctgttttttgaggcagggtctggctctgttgcccaggctggagtgcagtgtcaagatctcagttcactgcagccttgaactcctagcctcaagtgatcctccacctcagccttccaagtagctgggactacaggcacacaccaccacacccagctaatttttgtatttttttgtagagatgaggtttcaccatacttctcaggctggtcttgaactcctgagctcaagcgatcctcccacctcaccctcccaaagtactgagattacaggggtgagccactatgccagctgactcctttccattctgacagatgtaaacactgagaaatcttcttcacataaacaacaggggccaggcgcagtggctcacgcctgtaatcccagcactttgggaggctgaggcaggtggatcatgagggcaggagttcgagaccagcctggccaacatagtgaaaccctgtctctactaaaaatacaaaaattagccgggtggggtggcatgcgcttgtagtcccagctactcaggaggctgaggcaggagaatcgcttgaacctgggaggcagaggttgcagtgagccgagaccaggccattgcactccagcctgggtgacagagtgagactccgtctcaaaaaaaaaaaaaaaaaaaaaaaaactaaaagtataattggattgcttgtaacacaaaggataaatgcttgaggggacagatacagatactccattttccattttccatgatgtgattattgaccatcacatgcctatatcaaaacatctcatggactccatgaatatatttacctaactctgtaaccacaaaaattaaaaattattttaaaaaatgttttaggcttattcataatttttcttaaaatattaaatatagtctaccaatgcaaaaaacgaagaaaaagaatacttgtggaagatgatgatctaaaaaccaattcctttaaaagtttccttgcttgcactcctttggaaagttctgatgtaccccaggggtagagtgactacccacagctttaaggggattttccagatcctcagcttttttgttttaagagacagggtttcactgtcttgcccatgatcatagctcactgcagccttagcctcctgggctcaaatgatcctcctgcctcagcctcctgagtagtgaggcatgcaaaaccatatccagctgattttttaaaaatcttttgtagggatgggatctcgctgtgttgcccaagctggtttcaaatgcctggcctcaagcagtcctcccaccttggcctcccaaagcagtgggattacaggcatcagccattgtgactgcccagattctcagcttttgcaaatgttctaagtataagcctgtgataggagtcccctttgccctctggcagcttctcagcttaaattccaaggatccccactgggatccctcaagctttgagaggaaccttcttaccccactgtgagatgtgtcagtctgtgtgctactgtcctgggtttctgggtgagggacagccagctggctcttccagtcccgaagctggcgggagagaacctccagaatgacaagagagctcagcaggttatcttccaagtcatgtcgagacaaggcagtcagatctggaggccggctgcagcagaaagagaagaacatgacgaaaagaaaaggaggggaagggatgggaggggaaggtccagggtaatggaactcacgaggtgcaaggacataggggcgcttacccacacaggagctgctctgtctcagaagtactgtgcttggtgccaaccaggcctgtctgggatgtgtttgtactcttttcctgtggtgctgaaggagtaaaccaagtccccaccgagcaagtagagaaaggggtagtgccaattgcagcatcccgaagcatcgagggaagggataagctttggcggagattttccagcatgacggaggtatttacacctttttccagccaggccagtggggacatccaagactctgtatcagagccaagaatcctaccaacatcttctactgctgggcctggagcttcttgggattccatttctactagatttggtgtcaggcatgtggacagaatatcttccacacttgagacaagtgcttgatcttctgtttcagactccttaggatgtgtgggaaacctcatttctctttcctccatagctccatgctctacaatttcctcctctgggtccacatgattgacacggaaatctgctgccaaggcagttgaaggggaaagccagagaacagaggaaggcaagaaggcgttactttcagaaggtactaagtcctcacgcacagcctcagttctactgctcaggctttccttggagcaatgtagttgttcagaacagggatttggtggagactcctctaagagatgggacggagattcctgaaagataggtttctcagatacagcagcaacttctgaaaacctgtctcccatgcagggtgccacctcctctctcaccagatcgtctgttctcaaaggtccatttaaagatatgctgtttgtctctgccatggtatctaaacgggcctcaaatatcatgtcttgttgctgccccagtggagatggtacaaggacgatggttttaaccatataattgcccagtgggtctactgcttcctcagacgttttaggagtagagctaatttggggaattggatctagaggctgctcatctgattcatgctgacaagtttctagccactttgaggaatgactgaaatgttctgaagataagtctgtcctcttgttatttacaaaatccactggagatgagttgttgctgccttcctgccaaaggaaacaaaagtagttgtctaaggcagtcaattcagttcccgacatacaattacaggtgcaagatagtgcactcaaaaaagaaaagaattcttactacctctgcttaggtaagaacttggctaatctttgttgctcatatagagacccaatagtagggaaagaaaagctgctaagccattttgggtccttccaagtgaaccagcctacattataaacaggctgagaatatagatccatatcgtgggcagatggtagcttgaaagtgaccccactcatctccattctgaactctaacgcacttctagatgaacagataggaggggtccatagggtgtgagtgaaggcttaagctctgtcagaatctagagttggtacaagttcttctccctctcggctgggcgcagtggctcacgcctgtaatctcagcatttgggaggccacaagcaggtggatcgcttgagttcaaacctcatctctactaaaaatacaaacattagccgggcatggtggtgctgatgtgtgcctgtagtcccagctactcaggaagctgaggtgggaggatcactgaagctcagggggcagaggttgcagtgagccaaaatcgtgccactgcactccagcctgggtgacagagcaaaaccctgtctcaaaaaaaaataaataaataaataaaaaaggtagaccctaacaaaacagagctgctggaagacacagatgataatctgaacaacaacaaaaaaaacgagtacttaagctttaactacaacataaatacacacacaaagacattttagaaataataaatattattttaaataaaaaatgtcagtaaaatgaattgaaagagtaaattattagagttgaaactagaattactggcctggacaagtggaagaaatatcttaaagcaaagataaaaatataaagaaatgtaaatctgaagaaaaagctaagagaattagaagataaacccaggatacctaacagttaaataaaagaaattccagaagagaacatatatacatgaggcgctgattaacaaatattagaagaaaactaccctaatgaaagacctgagtttgcacattaaaatggctcaccagtttctaagcaggactgactagaaaagatacatgctagacacataattataaaatttctgtgctacaatgaagaaaaaactattctggaagctttagatagaaagtccaattatttattaaaaaaataatcaaacagaccgggcgcagtggctcacgcctgtaatcccagcactttgggaggctgaggcgggcggatcacgaggtcaggagatcgagaccatcctggctaacacgatgaaaccccgtctctactaaaaatacaaaaaattagctggctgtggtggcgggcacctgtagtcccagctatttgggaggctgaggcaggagaatggcgtgaacccgggaggtggagcttgcagtgagccaagatcgtgacactgcactccagcctgggcaacagagcgagactccgtctcaaaaaataataataataataatcaaacatatgaaatttctcatttatattagtggatgaaacaaaaccaaggttaggttaaaaagggcttctgatattctggtactgtcctacttactgacctgggtattagttacatggatgtgtactttatagtaatttgttatgctgttatgttttattgtaatttcatgtatcttactttaattttgaaattattaaaaggtatgatggctcacacctgtagtcccagctattcaggaggctgaggtgggaggactgctagagctcaggagttcaaggttgcaataagccaagatcacaccactgcactctagcctgggtaacagagcaagaccctgtctcaaaaaaaaaaataaaaaagacagggcatggtggcttacacctgtaatcccagcactttgggaggctgaggcggtcagatcacaaggtcaggagttcgagtgcagctgggccaacatggtgaaaccccatctctactcaaaatacaaaaattagctgggcatggtggcgggtgcctgtagtcccagctactcgggaggctgaggcaggagaatcgcttgaatctgggaagcagaggttgcagtgagccaagatcgcggcactgcactccaatctgggcgatacaacaagactccttctcaaaaaaaaaaaaaaaaagacaatataaagatgagtgtgtgtgtgtgtgtgtgcatatatacaaaatagacacacataaagagatgtatgaaagaactgtcaaatatgacatttatctaagataccagaaatatttcttccttatacatttatatattcaaatgcttcaaacaattaatatctattaataatcaaaaatttacaaaacaggccaggtgcagtggcccacgcctgtaatcccagcactttgggaggccaaggagggtggatcacttgaggtcaagagtttgagaccagcctggccaatgtggtgaaaccccgcctctactaaaaatacaaaaaattagccaggcatggtggcacgcgcctgtaatcccagctactggggaggctgaagcaggagaattgcttgaacccgggaagcagaggttgcagtgagccgagatcacaccactgcactctagcctggatgaaggagtgagatcctgtctcaaaaaaaaaaaattaggccgggcgcggtggctcacgcccgtaatcccagcactttgggaggctgaggcaggcagatcacgaggtcaggagttcaagaccagcctgacccccaacatggtgaaaccctgtctctactaaaaatacaaaaattacctgggcgtagtgatacatgcctgtaatcccagctactcaggaggctgaggcaagagaattgcatgaacctgggaggcggaggttgcagtgaccctagatggcaccactgcactccagcctgggtgacagagcaagactccgtctcaaaaaaaaaatctgccaggcgtggtggcacacaccgtaatcccagctacttgggagggtgaggcaggaaaattgcttgaatccgggaggcagaggttgcagtgagccaagattgtgccactgcactccagcctgggcaacagagtgagactctcaaaaaaaaaaaaatttttacaaaacaaaaataattgctattttattggggaaaaacccttttcattgtgtagctgactgcatctggaggtagtaagcccagcagttaagagggaaggagaattcgatttcaatctagtattctgctattgtgattaaataattatggttaaattctataagttcaggctgggcgccatagctcacacctgtaatcccagcactttgggaggctgaggtgggcggatcacctgaggtcaggaattcgagacaagcctggccaatatggcgaaaccccgtctctattaaaaatacaaaaattagccaggcatggtggcacgtgcctataatcccagctactagggaggctgaggcaggaggatcgcttgaacccaggaggcagaggttgcaacgagccaagatcgtgccattgcactccagcctagggaacaagagcaaaactgcatctcaaaattaattaattaattaataatcataataaattctataagctctatagagctaatttccacctagtacttatttatttttcatcttaagctgtactgtctaatatgatagccactagccacatgtagctattgaaattaaaattaaaaattcaggccgggcacagtggctcacgcctataatcccagcactttggaaggcggaggcgggcagatcacctgaggtcaggagttcgagaccagcctgaccaacatggagaaacccgtctttactgaaaatacaaaaattagctgggtgtggtggcacatgccggaggctgagacagaagaatcgcttgaacccgggaggcagaggttgcggtgagccgagatcgcgccattggactccaacctgggcaacaagagcgaaactccatctcaaaaaaaaattaattaaattaaattaaattaaatattcaattattcaggccaggcacagtggctcacacctgtaatcccagcactttgggaggccgaggcgggcggaccacttgaggtcaggagtttgagaccagcctggccaacattgtgaaaccctgtctctactaaaaatacaaaaaattagccaggcgtggtggtgtgcacctgtaatcccagttactcaggagcctgaggcaggagaatcgcttgagccctggaggcggagattgcagtgagccaagatcacgccactgcactccagcctgggtgacagagcaagactccgtctcaaaaacaaaaaaattcaattcttcagtcacctcagccacgttttaagtgctcaataaccatgtgactagtagttaccatgctggacagcacagattatcaaatatttccctcatcccagaaagttctattggacagtaggtattttgcaactctttcaagaaagactgctatgctatcatcatacttctgttactcaggatgtcatctgtctatacactcttctttcctcctcatacctattttattgatatcccatctccttccaaaaataattcatatgcatgaaaatgaatagatacgattaatgaaataacaaagtcatggtcaaaaaagaggaagcaaaacttcctatacagctataacagtagctgtatgtgatgatccagtttggccttgagctttctagaaggcagagcaagagggaaaatatggtaaactacatagttctcattatcagaaagaaaaggatagcaatttcttcaggaagacaatttttccaggcagttagtcctaaagcctttcttggaggaatcttatacaggagtcaagctgcttccttgacaagttttgacagcaactgaaatgcagtttctacatggctacgtctctcaaaacgtttaacaaaagtacaaatcagtgagggcaattctgcaaggagctagtttaaactaaggtgattcaagtaccctaccttccagtggtgtaacttgatcccaggagagttctaactacctcctagagtaaatggatattgcctcaatcttgcaggtgactgacctttccgtaagtgaccccatgttggaggaagagcactaatcagggtggtaggatttctcaatagtttgataaaggtcgaagggaggaggaggaggtaataaaaactaacagctaaacagagattcaagttctcactggatttcctttaaccaccctagggcacctctctgttggcctgaatagctgtaaatggatgtcaccgacgtagaagacttcattatcgttattaattattgtagccctggccctctgttcccctgagctctcaccctgggcaaacagcccagtcgagaagctgtccaggcgaatctcacctgcagccccagcttgcacagtgatggggtcagcgaggagcaagcgggggatctttttccagagttggtgagggcaccgggctgcagggtaagttcacggagaggagttctcatagatggttttccctgagaaagaaaccaagaaagagggcgagtgtgaggaagcctgggttctgccagcccgcccctcctccctccctaagaagcccaaaatgcgattagaagagtacgctcgcaccctagtcgcgcaggagcagcaaggcgaacaaagactccacaagcccccaaccccgggctcgacccaactttccaggacagtagacacggccggtgcccccgcgacagcagcccggcccagttctctccgccagagatctcccgcttaccgtctggggcgaaggcgacaggctgaggctcagttttttcactcgccacatcttcaaccagaaggcaggcctatcacgtctcagaccaagtcgaggacgccatgttcacccgccgtctgtgtttgaacctgctctgcgcttcctggttggctgcttcaggcgcgcgcgtacgctcgggggtagagcccggggggcggggcccgcgttgaccacgcccccggccctgcctgcccctccgttgtcgagcgttttccgctgacggagccctcacctcagacaccggcggtagggctggatgcgggcccggcccaggaccggtcttctgtcctcacaccggggaggaccacgcaggtagctggagagtccaggagtccatccctcctgcttccagcggacctcctcacatccatggtgttcatatccaagttgtctccgtggatggagaagaggaatcctctccctaggtctccctcagtcctctccagccgcagccttgacgggaaagagccggccagggagtctagaagccgaagcggtgccgagcggcttccctaggcttggtgggcccgcgtccgggacggcccgggccgtggttctcgacctgggctgtaatgtctccagagtttctgggcttttcctgggacttactcaggccggctaccagtttactgggctaaccgcctacatgtattgaacattgagtgtgtgcctggcgctatgccgaatgccgtgtagtagctcatttaatgcgcataaggacctacgtagtgagaaatactataaatatccccatttgtgacaggaaggagctgagtcagagagaccgtgtgtaatttgctcagcgtcacacagatagtaaacggcagagccgctcttcctccctgtcccgccagctcctgccttctgctgtcttggatctcctatgcacgggaaacctgttgaaggtaggacagccgaaaggtcagtattcagagtgagccgtttgcgaaggtgtgtgtgctttgcacactcacggcgccctgtttacactctgcaagtcttaatacatagggggaaagcagcagtccaaagaggaggaactatgatgttataaactgcagcgtcctcagggacgggctcctctagcattgtgttgtccagtacgttagccctagccatagtggcttttgagcacttcagatgtgactagtcccagtgggaatgtgctataaatgtaaaacactgtacaaactggatttcaaacacgtcgtatgaaaaaaagaatgcaaaatatcgccaggtgcggtggctcatgcctgtaatcccagcacggaggagacagaggcaggaggatcctttaagcccaggagttcgagacctgcctcggcaatatagtgagacctatgtctacaaaaaaaaaatttgggccgggcacggtggctcacgcctataatcccgcacttcgggaggccgaggcaggcggatcacctgaggtcaggagttcgagaccagcctgcccaacacggcgaaaccccgtttctactaaaaatacaaaaattagccaggtgtggtggcacacgcctgtaatcccagctacttgggaggctgaggcaggaagaatctcttgaacctgggaggcggaggttgcagtgagctgagatggcaccactacactccagcctgggtgacagagctagactccgtctcaaaaaaaaaaaaaagttaagccaggggtggcagggttgggggcacacacctataatcccagcttgggaggatcgcttgaacctagttcaaggctgctgtgagctatgatcatcccactgcactctagcctgggcgacaaagcaagaccttgtctcaaaaaaaaaaaaaaatatatatatatatattttttttttttaatactgtttacatattgaaatattttaggaatattgggttaaataaaatacattaaaattaattttcttttgagacagggtcttgctttatcacccaggcaggagtgcagtggtgcaatcatggctcactgcagccttgaactcctaggttcaagcaatcctcctgcctcagcctcctgagtagctgggactaccggcatgtgccaccacgcctggctaattttttataaagacagtctcttgccatattgcccaggctggtattgaattcctaggctcaagcgatcctcccatctcagcctcccaaagtgttgggagtacagtcatgaacgaccccacccagcctttttaaacttttttttttaatctaattttttttttttttgaaacatggtctggcgctgttgcccaggctggagtgcagtggcacgatctcacctccctgcaacctccacctcctaggctcaagcgatccttctgcctcagcctcccaaggagctgggattacaggcatgtgccaccacgcctggctaatttttgtatttttagtagagacaggtttcaccatgttagccaggctagtcttgaactcctgagctcaggagatccacccgcctcagcctcccaaagtgctgggattacagacatgagccactctacccggcccctctttttactttttgaatgtggatactagcaaattaaaaattacttatgtgggccaggcacagtggtttggctgatcttggctcactgaaacctctgcctcccaggcttaagcaatcctcccacctcagtctcttgagtagctgagaccataggtgcatgccaccatgcccagctaactttttgtgtttttggtagagacggggtttcaccatgttgcccaagctggtctccaactcctgagctcaagctgcctgcccgcctcggcctctgaaagtgctaggattacagacgtgagccactgcacctggcctatttaaatttttttaaaaaagctttgacaacatttctacattgaagactctatcaaacaagtaaccaataaattgagattactaatttattacatcaatgagcaagtgaacaaatgaacagattaatatgtaataaagtaacttaggttagagataagaaataatgagtagagctacaaagatacttttctagaggagtataggattggtgttgactaatcttaaattcttacaaaagataacatgaaatatagaattaaatatccattacaagtgaagtctatcagatttcttttttttgagacggagtcttgcctcgctttgtcacccaggctaggattaaaggcacgtgccaccacacctggctaatttttatatttctttagtagaaacagggttttaccacgttggccaggctgatctcaaactcctgacctcaagtaatccacctgcctcagcctcccgaagtgctgggattaaaggcgtgggccaccacacctgacctctttctttttttgaagcaaggtctctgtcacccaagctggagtgcagtggcatgatcataactcactgtttcaattggcaataatcagtaataattgtgcctcggataaaccttactggctatgatactgccactgcccaaagctgattataggtcactgtagcctcgacctcctgggctcaagtaatcctcctcagcctcccaaagtgtagggattataggcatgagccattgcacctggtcctgatttcttttagattaaaaaaaaaaatcagagcatataaacttaaaagatcatttcagattgtatattgaaaaaaatgaaaaaaaaaaatttttttttttttgagacagtctcactctgtcacccaggctggagtgcagtggcacaatctcggctcgcttcaacctctgcctcccaggcccaagctattcttgcgcctcagcctcctgagtactgggattacaggtacacaccaccatgcccagctaatttttatatttttagtagagacagggtttcaccatgttggccagggtggtctcaaactcttggcctcaagtgatccacccaccttggcctcccaaagtgctgggattacaggcataagccactgcactgggcctaagggaattttttttttttctttttgagacggactctcactgtcaccctggctgctggagtgcaatggcgtggtctcggctcactgcaacctccgcctcccgtgttcaagcgattctcccacctccacctccctgggactacaggcacgtgcaccacacctggctaatttttgtatttttagtagagacagggtttcactatgttggccaggctggtcttgatctcctgacctcgtgatccgcccacctcggcctcccaaagtgctaggatttacaggcgtgagccactgcgccgggccaggaatttttttaattttaatttttaatttttgtgagtatataggtgtatatattaagtgaatttcatgtgaatatgtaaaaggtataagtcagtgactctgaatggaggtggagggaagaggaggagaaaatgccttccagagataatcacatcagaactggatgaaagagtccgtgctttttctttttttttttttttaatgggaaaggacttcaatattttattttatatactttcttttttttttttttgtgggttcctctcttttttttttttttaatttaattttattttattttttattgatcattcttgggtgtttctcgcagagggggatttggcagggtcataggacaatagtggaaggaaggtcagcagataaacaagtgaacaaaggtctctggttttcctaggcagagtgtttgtgtccctgggtacttgcgattagggagtggtgatgactcttaacaagcatgctgccttcaagcatctgtttaacaaagcacatcttgcaccgcccttaatccatttaaccctgagtggacacagcacatgttttagagagcacagggttgggggtaaggtcatagatcaacaggatcccaaggcagaagaatttttcttagtacagaacaaaatgaaaagtctcccatgtctacctccctctacacagacacagcaaccatccgatttctcaatcttttccccacctttcccccctttctattccacaaaaccgccattgtcatcatggcccgttctcaatgagctgctgggtacacctcccagacggggtggtggcccagcagaggggctcctcacttcccagcaggggcagccgggcagaggcgcccctcacctcccagacggggcggctggccgggcggggggctgacccccccacctccctcccggacggggcggctggccgggcggtgggctgaaccccccacctccctcctggaaggggcggctggccgggcggggggctgactcccccacctccctcccggacggggcggctggccgggcagaggggctcctcacttcccagtaggggcagccgggcagaggcgcccctcacctcccggacggggcggctggccgggcagggggctgacaccccacctccctcccggatggggcagctggcctggcgggggctgacccccacctccctcccggacggggtggctgctgggcggagacgctcctcacttcccagacggggtggcagccgggcggaggggctcctcacttctcagacggggcggctgccgggcggaggggctcctcacttctcagacggggcagttgccgggcggagggtctcctcacttctcagacggggtggccgggcagagacgctcctcacctcccagacggggtcacggccgggccaaggcgctcctcacatcccagacggggcggcggggcagaggcgctccccacatctcagacgatgggcagccgggcagagacgctcctcacttcctagatgggatggtggccgggaagaggtgctcctcacttcctaggtgggatggcggccgggcagagacgctcctcaccttccagactgggcagccaggcagaggggctcctcacatcccagacgatgggcggccaggcagagacgctcctcacttcccagacggggtggcgtccgggcagaggctgcaatctcggcactttggggggccaaggcaggcggctgggaggtggaggttgtagcgagccgagatcacgccactgcactccagcctgggcaccactgagcactgagttaacgagactccgtctgcaatcccggcacctcgggaggccgaggctggcggatcactcgcagttaggagctggagaccagtccggccaacacagcgaaaccccgtctccaccaaaaaaatacgaaaaccagtcaggcatggcgccgcgcgcctgcaatcgcaggcactcgacaggctgagtcaggagaatcaggcagggaggttgcagtgagccgagatggcagcagcacagtccagcttcggttcggcatgagagggagaccgtggaaagagagggagagggttgggcatgagagggagaccatggaaaggagggagagggagagggttcggcatgagagggagaccgtggaaaggagggagagggagagggagagggagagctctattttatatactttctcatgttgttttaattttttgtttttgttgttctgatagagtttctctcttgttgcccaggctggaatgcaatggcacaatctcagctcactgcaacctctgcctcccgggttccgtgctttttcaaattataaaaattatactttctcaaactttttttttttgagatggaatttcactcttgttgcccaggctgctggagtacaatggcgtgatcttggctcactgcaacctccgcctcctgggttcaagcagttctgctgcctcagcttcccgaatagctgggattacaggcatgagccatcacgcccagctaattttgtatttttagtaaagacagggtttctccatgttggtcaggatggtctcgatctcttgaccttgtgatccacctgccttggcctcccaaagtgctgggattataggcgtggccttttttttttttttgagacggagtctccctctgtcgccaggctggagtgcagtggcgcaagctcagctcactgcaacctctgcctcccaggttcaagtgattctcctgcctcagcctcccaagtagctgggactccaggtgcccaccaccatgcctggctaattttttgtatttttagtagagacggggtttcaccatgttggccagggtggtctcaatctcttgacctcgtgatccacccacctcggcctcccaaagtgctgggattacaagggtgagccactgcgcctggccctcttcttttcttttctttctctctctctcagtcacccagactggagtgcagtggccaaatcatagcttcaggttatgatcataacctggagcttctgagctcgagcaatcctcccacctcagcctcctgagtagctgggtggtacaggaccaccacatctggctaattttttaatatttttatacagacgaggtctcactgtgttgctcaagctgtcctggaagtcctggactgaagtgatcctcccacctcggcctcccaaggtgctgggattacaggtgtgagccaccatgcccagccaaaaccttgatttttctgtcaccccctccactgcaccctgagaatcactgctgtaagtagactactgaagagagtatgttgaaaatgttctcatttggtaagaagtaattccaactacattcacgtgattatggtctctaaactaatatgacctaggagagagaccctagtgacattatgttaaccatttcttaaggaccttaaaccctagtgacattatgttaaccatttcttaaggaccttaaaccctagtgacattatgttaaccatttcttaaggaccttcgcccactgtgctgctgtggccacaaaagccatataatgttgggtgacctgaatatcaattaacacagtattataaaatcctctgcatctgcactttgaaaaagcatcacagggctgggagcagtggctcacgcctgtaatcccagcactttggaaggccaagacgagtgaattacctgaggtcaggagtttgagaccggcctggtcaacatggtgacaccccgtgtctactaaaaatacaaaaattagctgggcatggtggcaggcgcctgtaatcccagctacttgggaggctgagacaggagaatcacttgaacccgggaggtggaggttacagtgagctgagatcgtaccattgtactccagtctgggtgacaaactgtactccagtctgggtgacaagagcaaaactcagtctcaaaaaaaaaaaagaaagaaaaagcatcacaggccaggaacagtggctcacacctataatcctagtactctgagaggccaaagcaggtggatcactagagcccaggagttcagaccagcctgggctacatggcgaaatgccatctcttaaagaaaaggaaaggggaaggggaaagaaaagaaaggatatgaataaattgccttatttatttatataaataaataaatttcagcatcacagaaatctgaacccataccccacaattaagaaccagtggttattttaccctcattttatacaccaggaaactaagatccagagaggttaaaatgacttattaaagaagatgagagcctgggcgtggtggctcacgcctgtaatctcagcactttgggaggccaaggcgggtggatcatctgaggtcaggagttccacaccagcctggccaacatggcgaaaccccgtctctactcaaaatacaaaaattagccgggcgtggtagcatgcacctgtaatcccagctacccacgaggctgaggcaggagaattgctagaacctgggaggcagaggctacagtgagccgagattgcgccactgcactccaacctgggcaacagagcaagactccatccccaccaaaaaaaaaaaaaaaaaaaagacgatgagatagttattggtggatccaggcatcagatctcctaaattccaaacaaatgctcttaactactattttggaaaccattaattcctatttttagtattcagagtttttatccagtgtgcagttctggtcatcacaatttttaaaaagtaataaaagtgtctaaagagaaacaaatgagataaaaggataaaggatacattgccttatttatttatatcccaaccttattacaaaaaggcttacaagatgcagatattatagtaatataaaacgattaaaacttagaaaaatgagaataaggaaaataaaagtagaaaaggaagacagaaccaagaacatgactagcatacaaaatacataaacacttgctgaaggtagaccacaaattgggctctaaatggtctagtatcagtacaaacagaaaaatacaatcagctgaatatttagtgtccttaaggtaaaaaccaaacagcaattcaggaaaagcataactgggtccagagaaaatttctcccacgcattcttaaatagaatattatgaactgttacgataaacaccctttacagtatccacagcaattaaatttatttttttcctgagacaagatctcactctgttgctcaggctggatgcagtggcacgatcttcactcattgcaacctccatctcctgggttcaagcaattcttccccctcagcctcctgagtagctgggactacagtgtgtgccctcatgaccagctaatttttgtattttttggggagaaacggggtttcaccatgttggccaggctggtctcgaactcctgacctctggtgatccgcccacctcagcctcccaaagtgctgggattacaagtgtgagccaccacacctggcgagcaattaaatttcatagagattttcatatggattaccaaagtccaatccagaaaaagcaattctgcagaggccaataaaatgccagctatgcatggggaaatctggctcaatctagagacaaaattaataaatagaactaaagagtactctccagactgtcttttgtctagagagattagatgtaactaaataatatggtctagattaaaacttactttcccttcaagtctcaggacaaaaatgaaaattgtgagaaattagtttaagaaaaatgaaaagaagtcataaaggccaaaactgtatacaaatttaaggtccagatgattttccttactaaaggaaaaggttattgagatatgtctctaaccttaaatcttttttttttttttttttttttttttttgagacagagtctacctctgtcacccaggagttcaatggcacaatcttggctcactgcaaccttggcctccagggttcaagcagttctcctgcttcagccttctgagtagctgggactacaggtgtgcaacaccacacccagctaatttttgtatttttttagtagacacaaggtttcaccatgttggccacgctggtctcgaactcttgacctcaactgatctgcccaccttggcctcccaaataaccttaaatcttaaggttgatgcatgcctcttaatctcttggtttgcccatcagaaactgaatcatgggctcactaggagaaattgtcagtttaaaaatcctatgcttttcaaagaggttttattttggataactgttgcaattatagacctagagaagacatttaacccacccatgtttcagtttctattttcttcctcactagattattttattcacttttcaatttttaaaaattagatttattgcagactggcctcaagctcccagactatattttttagctgcattatttaggggttgaaatgccagcttttgagacttttgaaaaattcacaggctgggtgtggaggctcatgcctgtgaaggttgcagtgagctgagatcgtgccactgcactccaacctgggtgacgagagtgagaccctatctcaaaaaaaaaaaaaaaaaaaaaaaaaaagggtctggtgcagtggctcacacctacctgtaattccagcactttgggaggccaaggcaggccgatcacttgaggtcaggagtttgagatcagcctggccaacatggtgaaccctgtctctactaaaaaatacaaaaattagctgggcataatggtgtgcatttgtaatcccagctactcgggaggctgaggcatgaaaatcacttcaacccaggagacggaggttgcagtgagctgagaacgcaccactgcactccagcctgggcaacagagtgagactctgtctcaaaaaaaaaaaaaaaattcatattgcttctgacaagcctattaaacacatcaatagcaccctgggagcccatgaagtattattattgctcaagaaaggaaacatggcagagaaacaagcagaagcagctctggctgacagcctgagggtaaagagcactggagaagtaaagaaaaggaaaaggtcaccaccctgatctgacatgttgaattgagaggtaggttgtatgatagggaaggaatagggccagctgtggctgccagtagcagaatgtccaggttggaactctggtctaaagcctaggagagcagaacggtaagaggctacaaaataaaaacaaactggattatcaaggtggtcatactgagtaggcagggatggagatcttcaggctcccagccgggccccaatttacagtagagaggctcaagcagggatagggtagagcaagaaggactccagatcacagtcaaagtcgtcaaagggcatggtctccgctgaactgggctgggtagcttgtgtctccgtgacaaagttcactggctgcttctgtaggagctctgggtcgaaggccacaccccgaaagaaagggtggacctggaagtgatgcagataacgtagacgatggagggggttctggcataagagctgaaggaaaatagagcatgaaggatgagtgactaggacaggacaggcctgaacagaaaggatggaaaagaagaaagaagttcatggagctgtggagggtaggaataagaaccctgaagagtagatgatttgtaaaagagggagaaatagaggctaatttggggcaaaggtgggaataaggagctgtgcttgtgagttttcagatgagtgtacagtgttccactctctcagaagggacctctctgttctagatggggaggagatttgggggaccaggaacttaggaatgtgactcagtacagcttagatggcaagtagttaggtagttaagttggagccccctcaaaaaaactgatgagaggaatggggaaaaatcactttaatgaaggcaggagagcattaatggtttcgtagccaagaaggaaagcagtgctcatccttacctcatggagcaggagtgagaggccctggttaagagaagctgggatctcagagtcactgtgggtcacacttgccaacatggccacatgatctctctctgcagccactggaaactgagttaagaggtagggagtggaggtaggggtaggggttcattccttagtaggaatacggcaagatttcctaaggtcttccttcttcccaccacaaggcaaagctcttctctgcccaaaactactactattctctcacctttccagtcgccagagagaaaagcaagacacccagggaccaccaatcagcagcatggttgtaaggtcctccacttaggacctctggggctacagatttcaaagatactcatcacagacatcctttagctatcctcctgcccaatgcttacccatcagctttaacctctctcacccatgtactgaagagtgccacagatagtgtaggcttgagctccctggggcacgtggcgggacagaccaaagtctgtcagtttcagatggcctatgaaagaaggtaaggcaactgcaccactgttccacccatcatcagccatgatttattcccaaaccaaagtacctctcatcctggggctaaggaaggaaaaagacttacctcgttcatctagaagaatattctccatctgaaagatcacaggtgagaagtaattcttcctcttcctttcaactctctttcatcatgtatacaccccagctgaaggtgatgccctactcagcactcaaatctatactcagagagcccttccccaaatccttggcacccatgggggccccaatgtctacagttctcagctccctaacttcttggacttgttggcacttcttattgagactctttctcagacaaagggaaaaaagcacttaactctaccttcacatctcgatgcatgatgcccaagtcatggagataacctgtggataacaagtatggggtatgctgcagcttttctgtcctttccagtttccctagtagccctcatcccatccctatcctattctttaacttccattattaatattaattttttactctccttcttccgaacttaaatcttccctccccatttcctttaccactgtttcacttacacagtaccagcaccaactcggcagcaaagagacggatggaagcctcaggaaagcagccaacagccgaccaaagggagtacagatctgtgctgcagtagctacacactgcaaagccagtgtggagctacatacattgccagaagtctaggcaatgtttgggagctgcaatgcctgggctcaaggcattgtaggcctcctgcccaaactgataccacctgctgttcccctccctttgggacagagaggtgccatgagaagggggacagagcaaaggcagaacaagccaaagaggtaatctcaggtggggaacatggtacaaagaccctgggggatgaggagagagtccagtcactcactaatgaaaaggtgccgttttccctgccagctgtcccccaagctgtgtacaaagggatggttgatctgtcgctaggaacaaagaaaacaggaagttagggaggaacagggtcattgagaataaaggcagctgagaaatcaggttttacccagatgtgcagagggggaactgctgcctcacctctcagttcagaggaactcaatatttggaactgactatctggtaatcctagaaccagcaaatactaaggaatacactgggacatgcttcagagatttccctagtaggacatgggaaaactgtgttgagagctgatacttttcccaggatctactttagtgttaaactaggctgaagcagatggatgaggcagaaccaggaaaagaaggtgggcaagaaaggtactttccctacctgtggcctagctcttcccacaatcctttccaggactctgtgcatacctggatgctaacctcctctttgcactgcctcacggtatccctctgtaggacctttaccttgggcaccacctataaaaggagagtagtgatgactcatagatagtgctattgaattgtttattcctcccaacctctctggaatcaagattggaaacagagactaatgtggtatctacgcccctaccttcactgcaaatacagctttctgggtgcaatctagcaccttgaggacagttccaaaggagcctttagccacgaggcctaaaatctgtacagaggaatggagaacaggccagttgagactggtcatttttaacttctcccaaagactgagaccccactcagggattccactgacttaccttcagctgctgctgccccctaatgggcctaatgggaaactctggtagaaagaggttgatgaactgaggcactggccactctggcagaggcttctctaccagtactggggctggctttagggattcctggtgcagatagtggtgcccccgtagttcccagagttcttccagatctgacctgatggttcccaaacctgtccagaggctcttccagcctcgggcccagggaccccggatgttgccaccctgctgagaaccaagggagccactctaaactttctgctcctgaggcatagcaggttccacccatcttactaggcactccctccccttaagtctcaacccctagaggtacatttttgagcatgaggcaaaattcccattacccttgctttgtgctaagccccagatttcctgggcacaattcaaatcctctaggaaaataattgttggacattttcaccatgacgcattaagagtacagcctgcacctcagtattgggctgtgatgctttcatagtacagcctccctgccccacccccacattgggtaatcacttccatgctcctaaccaggaacttcccaggactcaagcccatgtctccctctcctcccctcagtaggctgccagagccccacagcctaccttgtgagggacagccacccgggtgtgttccccctgctgggtgtgctgcccctgccgacagcttactgctcccattcccagcctctgcctcctctctctgctaaatctgctgtcccagttatataagcaattcctctccctgatgctgcgtgacacgagccccgcctcttccagtctgcagaaacccatcagcatggggccagagtcacactaggactagaaatttctgtgatacagcttcagggcagaggaaggaaggggccaccctcagagtggcagctgcaggatgttctgggttgatgagggaggaatacacagattgaatgcatgcactcaacacacacacacaaaaatgagcatcaaatttaaaatatctttttttttctctttaaatcattttgccattctccagggtatatcctacggggaagggtaggggacccatggccagccctggctcctactgccatcctcccaagtgaacttagcacagagactggggaggggttgacccccactccagaacaccaatacctctttcaaacatgacagtggagtgaggatcagaggatcagccccctcccgtttcctggcacagaggaaggacagttacacttagaaatatatatataatatatatatatttatatatgtctataaaaatttatcacacttgatcaggactatccccctaccctttcacttgaccccaagggaatagggtcctgccctgggcccattccctgggtcttgctctcttgttgcctctctggccctgagcctgatcagtgtgagacagaactcagcattactgtccaccatgccctgcagcgaacagaccaggtgctgaagagtgatgcctatgggctctgacacccacaaatcctcgtggataacgggaagcccctcccaccccacaagtccctggagcctgagccagagtcagatcctgtactgcagccactcgaatcgccaaatcatttgcgcctgccaaagatggacttcttgccagggttcttgtcgcccacacttaaaccaatgaggagccgggctttctcctcctcttcctgctgttgcatgttcaggtccgatttagtttctagctttccccggacctcagagcctgttgcagacttcagccttagcttctctttgattacctggcagattggagaggagtaaaagaaaatgtaaatattagtgggcaggcagaataaatcaaaatgaaccaagacaataaagatttattaaacacatccaaggcacaatggggcaattcacatacaatggtctctgctttcaagaagcttacagtctaattataaccccttctaaactttaggttgtgttagctctcagttccctaaaatcaatggtgctatacgaaacactcagtaaacactgaatttaataatctgagtgaggtcatggagagggtaggcatagaagccactcacttcatgcacctgccccttcccaaggatatttattcatggattctaaaatgaaaggctcctgaaaagaggatctgcctgccagccccattagccaaacagccatgagccctggcgggatacctgggcaaccagggctttgcggctgtcccttttgacagccatggcaaagtctagccatgtccatgtgttgttgtggtactccagacagggcagcaccaggttaaggtcaccccagtccacactgttcttctcaccctgtaagaggagggggaggggaaagaaaaaaagaggggtggggaatacatcagctgccattttgagtcccagccagccacttgagtgccaagtcctacaatagtaacctacagatactgatttccccttacctcagcctcgtaatgatgctgactcttgaggggagcagagggaacagcagatttatcacccacagctcagcatcacaaacaacctagctgtctccctgtatagaatctctgatcttatctggttcccttcccaccctgttctacaaagtgcttgagaggtgcagaccttgtagctgacacacagtggaacctgtggaatctttatgtagatgaaggagttgttcatggcagctcgctctttcatcttgtcaatgtcatccacagggtgctaagaaaggcaggcaaggagtgtgagccctgaatccatcagaagaaactcaggaccccaaacatctccctcttcttttatccctagaatggacttagaggaaaccgaagaaatcccaagccacaccaaacaggacctcaagactctcccatttttctatcatcaggggcatgtttggtacctctggcgatttgcgaaatgaccttctgaccccagaactccgagtcaaaccctgtgccacacccttcccagggcccagtggtactgcatcatctgttgcaatcagctgccgaggcttcaccactggtattcctatgaaaaagcaagtgtaccagctgtcatccatcctcgttctgaagtctcagctgtctttggggttgctaccctattcttctggggctccaccataaaagttctcaccagtagtcaccagtttggacttatcctcttcatcaccaacttcatcatcttccacacttcggccaggaaagaaaaagcccatcattctgtggaagaactggtgtgtcagctggatggtgagaggcaccacatttacctaaaaaggaaaaagattcaagaagcaattaagctcagataccatcatcagtttacctactcctaatatcgtgtaacacacaggtggcttttgaatgtcccttgttcccaggtccctaagggactgcttactaacctcaaaatgctccttaacagagatacccccaacagggggccgaactttgctgaagaggcggagagctagctgtcgcccagactggcaggagctctggggccgcagtactacctgtaggatagagagtaaagaagagcccaacccaatgtccttcctgccataaagcaacccacaaatcctctgcagaatgagaggagaagcaatggtactgctaagctgggcaagctttcaccctctcagatcaccacattgttttccatagtggatttatactgaagggccgttataaatgccccgtgctaaaaacatgcaaatggactaggaaaggggaaaaaagacttgccttatagacagcattggggaggaggttgttcatggtaaaccagcccaactccagaagatgttctgctgtgtcatcagacttattcacctataaagacagattttgccccatctactataataaacctttctcagaagtctactagacaattgttatgtatccagtttgttttcaggctctacatatgcctaatcccaaccttgagatctccttcaaactcatacaatcaacactctttaatccagtgtgtctcatgggcactattgtccaggacactaaatgctggtagtactatctagccattgtgacattaaaaaatgttctaattcatttccaaacgcctctggtaggagaaagtaataaataatactgccttctttacgtcaatggcagaaaagctgaatgtcagtattagaatattctattccaagctagacatgaaagattatttgcctctgggccatacttctagggatcatcttcttactcaacaagagaagcatctgatcaaactcacctgtatctgtatcttatttttatttttttgagacagggtctcactctgttgcccaggctgaagtgcagtgacacaatcttggctcaccgcaacatccatctccttcctgggttcaagcgattctcctgcttcagcctcctgagtagctgggcttacaggcacacaccaccacacccaattttcttttttttttttttttttttgagatggagtcttgctctgtcaccaggctgcagtgcagtggcacgatctcggctcactgcaacctccacctcccaggttcaaacgattctcctgcctcagcctctcaagcaactgggaccacaggcgtgcaccaccacgcctggctaatttttgtattcttagtagagatggggtttcaccatgttagccaggctggtcttcagctcctgacctcaggtgatgcacctgcctcggccttccagagtgctgggattacaggtgtgagccaccgtgcccggcctatcatatatgtttttaattatttattttcttttttagagacagggtctcactctgttgcccaggctggagtgcagtggtgtgatcacagctcactgcaggctcgaactccagggctcaagcaatcctcctgcctcagcctcccaagtagctgggaccacaggtatgcaccacgatgcccagctaatttttaaaatttttgttgaactcttgactttaagcaatcctcccacctcagcctcccaaagttatgggattacaggcatgaaccactacacgtggcctgtatcattttttaaaaattattttatttctttgttcattcttactctccccctatggcatcagagctatatgtgtatcattcattataaacagatatatctaaggaagctctgctcattaatatgattaatgagctcgttaatattaatgatactatcattaataatcatacaataattaacccccttttatttctcttttatgagttagactcctaagctaggtcaatgtctctcaatacagctgcctttgtgtgaccatataccccagataccttgctgtagaggaacctctgcagttctaattcagcaattcccagctgtccatcttcctctgtcaggcgccaccgtgcctgagcaaagtaaaactcagtgcgacggaccacactcacatcttcttgctgctttcgcagctccatcttgttagcccgctgcagttggaaatccttaaaacacctgtaagtggacaggggagccaaagccagtaagggaaacagcacatgggttgggggtgggatagaatgctctagaatgatgcaggaggtaaacccagaaattaacctattctgggttagccagtccctacatttttttcactgaatttattgctcctgacattctaggtcataggagcacaaatcccatctttcagctctatagcttcttgataaagtagtgtcttcccactaataattcctacaattttatctgcaactgtatactgatcaacttcaagacattttcatatgtttatgtcaggttcattaaaaaaaaaaagatattttcagttcagatgcatagtatcaaggccaccaaagtgatctttcagctgggtgtggtaatcccagctcacgcctgtaatcccagcactttgggaggccaaggcaggaggactgcttgagcccgggagttccagaccagcctggtcaacatagtgagaccactttgtctctaaaaaaaaaaaaagtgatccttcccaactacccattttcttattcaggaagagatgtctgaacctactcctacatcagcctttgataatgcacactagacctaaagacagtcaaaacatgggcaagaaagagaactgcctctagctggggcactggaaaagggcaaggaaagaatgctggggcacctgatgaggatattcagttcttcactttccagctgcaggttggccttctcctggtttagctgcaactgaagcttctggttcaggtcaagcagattctcattcttgctgtcatcctgcaaagactagggaaccaggatagaaactgagagaccgccctcgttctaggagacttcctggttctcaaactatctatctgcagtgactaccttcatgatagaatacatctgcttctccagctgtcgtatttgggccacatgctgccgcacagcctcctgcaaatgcagtatgctgctgcgttgctcctctggattgctagagatctcaagctggaacctgacccgttgcttcttctcactatgttcctaaaggaatggaaagggaaatgaatatgatttttaagtagacaagtcttgtagtaaagtgaaatagagaaaggagaaagaaatggggggggtctcttctagaaagctaacctttatctgtcactggtaatagcaacagtagtaggtcaatgcagaaaatgtggcaatgtggatttcacaataggtcaggcccaacaggatgggatggaggtggaagcagggaatagtaaatgtttttagaggtgtctaggtgactgagtagagaaatgactaggagaaaacaatcaggcaaacaagccctacggtctgagagatattcaggcctttcctaagtaagtggaatttcaattgtcactgccgactaagagaatctaccaaccacaaggccctttttcagtgtgaagcatggcttttgttacagaagcccaaataaagcacaaagtctgggtgttcctgtgaggctaaccagcattctacaagggcccatgctcaccttccgcttaggttctacatggagcagcaggttgttgacaatgtccaggatcatggcatactgagctgggttggtggaaatttccagctcatggtggataagggtgaaggtatccacagcccctagataattgttagcagctaaataaaaggctcaagtttctacctaaatatctactccatctcttaacccacatttggaaccaccccactagtcaaccccacagaaagggtgagagttgctcatgggcagaaacatgtttacttcagaatcataaacaatgcccattcatcccagctccctccaagaatagaggttattttctcatagcagaacttacaaaaagtagagcaaagtgaaatgttaatgccagtgcacagtggatttttaataactctactgtctcaaaaccaccaaggaaataactactttcacaatttctctagtcccttcctaaaagcctttcaagccctgaataccttcctgcttctttaggagatcttccttttcctggttctcaagaacttcaggtggcttaatctgagttgctagttcaggatcaatgtcatggctgtaactaatatagtacattcggcagttgcaacgcgaaatgatccgctggacttgctgggcttgctgtgcctcagctggctggttccaatctgggaagaggtgggaaagagataagaaaaagacattctcaataaagataatgtgagagcctcccagctatgtctcagaaactccagaaacactgctttcaacccagcctagcacaaaatggtcctactccagcatacactgacgttaagaataggtagggaaatgaggtccctttgggatgcacatctgctcctaatcatttgatgcagaggagggggagggctgacctgtggttgtggtaaccatgccgcccactgcctgcccactctccatcagctcctgcacagagtccagactacgctgccggtgctcctcgatattcttcacctgaagaaagagatgcaggcaactttagctcctgggaaaagagtggcttgtcctggacaattgggtgacagatctccatgtttcaagtagttacacttactatctggacctccactgcatggaatagcttgaaccatatctcccaggatagaggacatacttgtctcattctcttgccccagtctacccaaattctccaacccaactgagttacatgcacactttgccaggcccacaggtctcgagccagaaaaacaatgagaaaggttcaaatctaatcatgtcatgggcaaaatatctcattaaaaaaaatgactttctcacacattttggtatttgttccatttgtgttcttgctttttctatcttcagatagataaccactctgacaatgttgccatgggcgaagggaattgaattatttttattcactctgccaagctgaagtcagagtgaataacattgagtgagatgggaagaccacagcagatggtggatctgacaagtctcaaaaaaatataggaaaggccagatcaaagtcccttgtacctaagcccaagatgttccactctaatgctagtatcgcagcctgaggggggcggggggaaagagttcacccacaaaagaaggcatgcctaaaagcagcagaggtgcaaaaaatgccagaaagatcctgatagctcatccattctacttctgcatgggtagttaacacctgtgcttacctcctaagactactgataaagagcactgcttgtctgaatgaaccacagctcttatatatcagcatgacttctcatattaccaacaaccggtcccttacacggcttaacatctgatctaaatgctcattacctcttattacacttgaggttgcctggattaagccctaaggtccttgataaaagaagcatcagccagggaggtgaaaagagggatcagttttatccccactaagtagaactgcaaatggacttatcactgtggtccttaccagatacagctaaatcctgtaactcatatagggggtgtaccatgcccagtacaatgtggacacttaacacctgttaaataagtaataacgcacaatattgcctaggcatatctcataatcaatagactctccaataattctgatgatattatatcttagaagttacagggtaaaatataacctggttcagttttaccaagaagctgaaaagaaaattaacaaccacgcaatgcaaagacaggctccttcccttgtttctgccaactgctcacaatctcaccatctaacaaaaacattatcttggctgggtggggtggctcacgcctgtaatcccagcactttgggaggccgaggcgggcggatcacgaggtcaggagcgtgagaccagcctggccaacatggtgaaaccctgtctctactaaaaatacaaaaattagccgggcatggtggggcacgcctgtaatcccagctactcaggaggctgaggcaggagaatggcttgaacccgggaggcagaggttgcagtgagctgagttcgcgccattgcactccagcctgggctacagagcaaactctgtctcaaaaaacaaacaaacaaaaaaaacaaaaccacattaccttgccacacacttagacctccccagacatactgacttaaaaaaaaaaataagagtactttccacctgaataaagctttatattttcaaagcaccttatgtgatcctttcaacaatcttgtgagggtgaagtatcaattccatttcacgattaaaggtgacttgtccaagagctcatggctactataatgggaaagctatcattagaaatcacataacctgactcctaggcagtctttcattcaacctcactgccttgctgaaataaccaatcagtcattttcatgagaggacagagaaagggcagatagtgaacttactgaaaattctcagtcactgcctgttttcttggctgcctgctgattagtgtgaacattaatagggatcagcaatcttaaaaacagttccagtccattttatacgagttctgagaaatgagagtttcttttgcaatgaaatagaacaccatgaggaaaaaaaaaaaaagcactacatgcttccagaccagagattgcccacattcaaggtgttattagcctcattattctgctaagctagtaacagcaggttactgtcaagaatcttccagccattagaaagtctacggaaaaccaggaatataatgggccttcacaaactcactgactaacctctaaccagagctgtcggccatcctgctctgtggggctgctttcagtggtggcaaagtactgcatgccatccaagaggcaagtccaggatgtcttttgcttcaatgtatcaccataccaggctggatggtgctggcactgcagcagttgggctttggcagctgacacaatgacacagccttctgtctctgctccacgaagaaccatctatgccagagatagaagcagagttaagctaccaaggacgatgaggttagtgagcacattgtatcaaccactgcagctaggtctaatgctggcttaccaagtaaattttactggcttttagacatagaagtgattacctatgatacctatgagaaggccaaattttttggagctctattcacccattcatatttagaggtgggggaaggggaacaatatgatcatgatctagcctgatgttgaggtaacttgtaaagagaaggtacctgacagttgaccaattcaataaggcagtttcggttgtatatgtcatccgtctggcaggcagcaatgccacacaactggtcactcatgcctgattcctcttctgtgaacactacaaacctatctgtctcttcaattagcttctgcaacatgtaagcacctggcagagaaataggaagcagggaaaggtcacagtctcaaagggaaagacttttccctttccagagccaaattgatcttccctcaatttatctggctaggtaagagcttagaatacatcctcccaaacctaaaactctagcccagcccatcccttgacccatgaaggcaaaacaagggttatttcactttcccttcaattttaataaaagtaacagattcccaacagaaacttagaaatgctaggtaacatttttttctcttaggtattactctatgatctctcccttacccccattttatttcttttttcatttcatattattttacatgttatttgaccactcttttccacttgaaaccactctcttgccatcaatgtcattatattctctgaggtctgctgcttcccctgattatgtctccaggccctcttccttctcccaggtctaagctcctcagatccatccttggcatgttcccttctctttcctactctttctcttaatgggtttgtctaacagagtgtatggttaagagcacagtctccagaatcagactagtctgcctgtattgtgaccttgggcagtctgccctctttgcatcatagtttacttgtttgtaaaagagtaactctctcatgagattgctatgaaagtttaacggggccaggcgcggtggctcacgcctgtaatcccagcactttgggaggctgaagtgggcagatcacgaggtcaggatattgagaccatcctggccaacatggtgatactccatctctactaaaaatacaaaaattagccaggtgtggtggcatgcacctgtaatcccagctacttgggaggctgaggtagaagaatagcttgaatccaggaggcagaggttgcagtgagccgagattgcaccactgcactccagcctggtgacagagcaagactccgtctcaaaaaaaaaaaaaaaaaaaaaaaagaaaaagaaaaagaaaaagaaaaaagaaaaaatggaaaaatacataaaaatattctcttacctctatgctgaaattcccaaatatctatctttagccctaagcttttagactctaatttccagctgtttgttagacattatattgataccttactagtgacgcaaattcagcatgcccaaatgtgaactcaacaatcctacacctcccaaacctgtttagtctcaggctctatttctgatattactgttaccatcatgccagtcatcaggctcaaaatctagtcgttataattttctcccttaaactcctccttccaaccagtggtcagttcacccatatgcatcttaatctttccatccatcttatctccattcccactgcctctacctagttctagccctcaatgcttttttttcttcccttgagatggagtttcactcttgttgcccaggctggagtgcaatggcgcaatctcggctcactgcaacctccacccccaggttcaagcaattctaccgtctcagcctcccgagtagctgggattacaggcacacaccaccatgcccagctaatttttgtatttttagtagagacagggtttcaccatggtggccaggctggtctcaagctcctgacctcgtgatccatccgcctcggcctcccaaagtgctgggactacgggcgtgagccaccatgcctggccccagttctcaatgcttcttactgagacaccatgatagtttcctaatttgtctccccacctccagtttcttcctctccaatcctcctacacactactcccagatctgtcttcataaaagtaaaacaatgacacacccatgttcaaaaacattcagtagttcaccactgcctactgtacaaggaccaaaaactacttagccctatatgaaaggtctttgatgatctaccccagctttcctttccagtcctttctctcactcctctcccttagttactctctgtctactaaaagagactgtttactctctgtgatactgtgaaatatatatttggtcttccctgcttcctggcatataaaatctaaaatcattagtgcctcctaagtgatgtctttttgtgtgctgagttgactagttgctggcagcccctaagtagcttccagatggtggctggtcactggaaagacccaggcaggattagagggttataattttcagccccccacccaacccacacttcctgggaagagaggggctgaaggctaagttaatcaccaatggccaatggtttaatcaatcatgcctacataatgaagtctccattaaaaacccaaaaggacagggtttggagagcttctggatagctgaacacgtagaggttcctggggcatagcatgcctgcctggggagggcacagaagcttcccgccacttcccatacctcgcactatgcatctcttcatccatatcctttgtaataccctttacagtaatccagtaaacatgtttccttcagtcctgtgagctgctctagcaaattaattgaacccaaggagggggttgtgggaacccgtttatagccagttggtgagaagcacagataaagcaacctggagcctgtgactggcatatgaaggagaagggcgggcttagagactgagtcgtcaacctttggaatctgatgctgtccctgggtagatagtgtcagaattgaactgaattagaggacacccaactggtgtccactgcagaattaattgcttgcttattggttgggaaaaattcccacacatttggtcacagaagtcttctgtgtcaattgttttcgagtgagggaatagaaaaaacacttttgagtttgggtttttccactcaagactctgctttgaacgcactaggctttcaaactccactcctactcagattattccctctgcattgattgcccttctaccccatttctacatgttcaaaccatactaggctttcaaggcctggctcaaatgctacttcctcaataaaccctcccctgatggtattccccccttcactcctgtcagcaatacctccattttttttttttttgagacagagacttgctctgtggcccaggctggagtgcagtggtgcgatctaggctcactgcaagctctgcctcccaggttcatgccattctcctgcctcagcctcccaagtagctgggactacaagcacccgccaccatgcacggctaatttttttgtatttttagtagagatggggtttcaccgtgttagccaggatagtctcgatctcctgacccacccacctcagcctcccaaagtactgggattacaggcgtgagccactgcgcccggccccatattctttttttgagatggagtcctgctctatcacctccacctcctgggttcaagcgaatctcgtgccttagcctcccgagtagctgggattacaggtacttgccaccatgcctggttaattttttttgtattatttttagtagagatggggttttgccatgttggccaggctggtcttgaactcctcacttcaagtgacccacccacctcggcctccaaaagtgctggaattacaggagtgagccactgtgcccatccaactcccattttcttttatttctctcttatggcatttaccactttgcttctttcccttactcatcttgttttggctccaacactccccttctgattctcttctggccataggaccagaccatttaatgccccaacatcactgttacttaatatgtaagacttaggtggcctaagaaggaaaaataatagtttcacttctttacctagatagaagcaccatgactcagtccttttaaaactcctgtccaagcccatatccatgttctaaacccaaacccaaaaagtctcatctccccgagcttacctcctgatgaccccttatcaggttgtccactgaagctgggagtgttaacacgaggtggggctgaggcactagttgggacaccccgctttggctttttggctggcatctgtggatcaatctttaaccccttcagggcctcagtagaaagattacgtttgagtacagctgcctttttgtacccatcatataacccaaaggcaatgtctcgattggtagttgtccaggaaatccgtaaatctactaagtgcagctgatgtgtatgaaaggtaggatccccatcacgagcagagagctcctaagaaacaggaaaaggacttcagggtagcatggaaattgcccccagtgccacagaggcagtgataaaagtttgttgaataagaaacctgttggccagatgccatggctcatgcccgtaatcccagcactttgggaggccgaagtgggcaaatcacgagatcaggagtttgggaccagcctggccaacctggtgaaaccccatctctactaaaaatacaaaaaattagctgggcatggtggctggcactggtaatcccagctactcaggaagctgaggcaggagaatcgcttgaacctggcaggtggaggttgcagtgagccgagatcacaccactgcactctagcccaggcgacagagagagacgcagtctcaaaaaaaaaaaaaaattcactgggcgtggtggggagacagaccctggagaagaaaaactaagtggtcttggcttttatattatattacattcaaactatacctactgtattttattctttatcaaaaaacgttttcagagttcctctaaaattttttttttaagaaatggagtctattttgtccagactggtcttgaactcctggcttcaagcaatcttcctgccttagtctcccaagtagctgggactacgggcacaagccactgtgctggcccattttattttttaaatatatttatttatttttatttatttatttgagacagaatctggttctgtctcccaggctgaagtgcagtggtgtgatttttttttgagacagagtctcactccatcacccacgctggagtgcagtggcatgatcttggctaactgcaacctctgcctcccaggttcaagcgattctcatgcttcagtctccaagtacctggggattacaggtatgtgctaccacacctggctaatttatttattttttatttatttatttatttattttttggaaacagagtctcactcttgtcgtccaggctgaaggcaatggtgcgatctcagctggctgcaacctccacttcccgggttcaagcgattctcctgcctcagcctcccgagtagctcggattacaggcacctgccaccacgcccagcaaatttttgtattttttagtaaagatggggtttcaccatattggccaggctggtctcaaactcctgacctcaaatgatccgcccaccttggcatcccaaagtgctgggattacagtcgtgagccactatacctggcctaatttttgtatttttagtagagacagggtttcaccatgttggccagtctggtctcaaactcctgacctcgactgatccatctgcctcagcctcccaaagtgtagggattacaggtgtgagccactgcacccagccttaatggtgcaatcctggctcactacaacctctgcctcttgggctcaagccatcctcctacctcagcctcctaaatagctaggactacaggtgcatgccaccatgcctggctaatttttttgtattttttgtagaaacacggtttcaccatgttgcccaggctggtctggaactcttgagctcaagggatccacccaccctggcctcccagagtgctgggattacaggcatgagccatcacactttgcctatttatttctgagatggggtctcactctgtcacccaggctggagagcagtgatgcggtcatggctcactgcagcctcgatttcccagactccagccatcttcccacctcagcctcccgagtagctgggaccacaggcacatgccaccacacccagataattttttgtatttttggtagagacagggtttcctcatgttgcccagactggtctcaaactcctgagctcaagcaatccacctgcttcagcctcccaaagtgttgggattacaggcatgagccacctgagcccagcccccactgtttttttttttttttttttttttttgtattttggagacagcatcttgctctgtcacccagcttggagcgcactggtgtgacctcggctctctgcaacctccacctcccgggttcaagagattctcctgcctcaacctcccaagtagctggaactacggtcatgtaccaccattcccagctaattcttttgtatttttagtagagatgggggtttcaccatgttggtcaggctagtcttgaactcctgacttcaaatgatccatccgccttggcctcccaaagtgctgggattacaggcatgagccaccgcacccagccctcccccactgtattttaaatgacttgagaatttcaacttaaaatccttccctaattgggggaaaggcagtaccaatttttttttcagtgttaggaaaaaattttactctatttcctaaagagtaacatactatttttaggagagaaagaaaaagtattttcaaaaagaaggatgctgatacagctaaaccaaatgagtttgtcataaagtaatgacatacatgcttggaatatatgagaaaccttaccagggacttaatctgcaacctactcctatggactttactgtgttccccccaaattcatatgttgaagtcctaacccccaatgtaacagtatgtggagatgggcctttgggaggtaatgacataaggtcacgagggtggggcactcatgacagaattagtgcttttacaataagagaaaccagagcactcgtgcacacttgtgctctctctccctctctgccatgtgaggacagacacaaggcagccatctgcaagccaggaagacagccctcaccagaacccaaccatgcgggcaccgtgatcttggacttcccagtagccaaaactcataaataaatttttgttgtataaacctcccagtctctggtattttgttatggcagcccaagtaggctgagatacctactaatataaataaggtaataaagaaagtgtgtcagggagtacctcctcagctgtgcgattgctatgccgttggtaggtgagggaggacaagctcagcaggtgggtctttgttaccaagggatcaagacagtgatcagcattctcttcagtgggtgaggccatcaggtgaacggtcacctgacttaggtcactcaccatctgggtaacactccaatcagagataaggcgccgcatcactgtgcctgctgagaaaaagaggcacacagagaccatgctgaccagttcagaggatagtgtaagacagagatggaggaggggaatggaactgagaagggaaaaacaaggaacaggataggagaaatgaaaggagtctttcattttaccttgaggtataagccgctgagtcccccgagtgaagacatggccctgactgcactcaatctggatgccccgttgctgggcaaatgaggcccaataatgtacctggcaacaagagagcataacattaacaaaggatggcatgagagggatgattaagggactcaatatgagaaacaagaaaactagaagcagaataaagtgaagatgtcagcagggacatcagtgccttacctgcagctggggaaagagggctgtataggaaagttgcttgtagtgctgaccaagtttcttcttgctgggtttcaggttattgaagagctttcccctgcagataggccttgtgacacttgtccaagttgcccagaagttttgcatccagcgcagggtactactatatagcagaattcggggctgggatattgctgcaaagagaaagacagacatttcctagttatggatgaaacacagaggtaaagctaaatccttcccttgctgcaggttgtagaggtttaaaaatccaaaatccaaacagcacctagcctcacattcagcatccccaactccctcttctttcaaggatctaagctctctgctttcccctactgctatggtctaaatgtttgcatctccccaaaattcatgctgaaatacccctaaggtaatgatgttaagaggtgggcctctgggaggtcactagatcatgacggtggagccttcatgaataggattagtgcccttttaaaagtggtccaagggagctcactgactccttccaccatattaggacacagcaaaaaggcaccatctatgaggaatgggccctcactgacactgaatctatcagctctttttgatcttcgactttcaagcctccagaactgtgagagataaacgcttgttgtttataagctaccaaacttgtggtattactgttatagcagccaaaaaggactaagacaccaaccctttcccctgccaaaaaacaaaaaaaaaggtcctaacctagattctcccttgcccttctcccctcccctcccctccccagagggtcaagctaaagtccccagcatccatgcccgtcctcccaagcccttcctccccactgccccaggcccaagcctcacttccactgtgccgagtcagatccatcttgatggagagattgaggttctccgagcgaaaggcccggtaggagtcatgaagctggcccaagggcacctcaggcaggaactctggggcccgcagagtgacactatggtgatcatgggggttcccatggcacagccactgcaggtccagtgtcatgcagaggtcaggcaggtgaaggaagcagcagtcgtcatacctgcctcacaatggaaccccagccctcagtgccctggtcactcacttccccttggctcttccccctccctccaacctgagcccctcatcccatggaggaccctcccttcactccactcacttagaggctgttctcacgttgatatccaagtcacccttgaacacaaactgaccaggtttccaatgaaaagacaggtggctccactcccagtgcatattttcagttgtgttgtatggatcctatgaccacccccgagaatttggtgagatataggtaagaaaaccatcctcatctcccaaatcagcacctgtctctcttcccacatgtgctatacagacctcaaccataccatcctgataggataaaagtatcatgacacccctcacctcagtggccagctggtgcaggttcgcctgttcaatgtccatgtgccagtctccatggaacagaagacggctcttgtcccaccagggcaaaggtgggctggggtcagctgagggcttggtcaagaggtccacacactggccaattagtgtccaggctggatcccagcatgggccccacaccactgtgtactggaatatttccgctggggtagaggaacaaaggctataacttgttcacaacattacccctctcttcctccttcactccagaagggtctcagctcacctcccatttcacccatcacaaacgtccctcagccaaaccaactgcctcatctctactcacagtgaaagtcatggtagaatttgagtgggggcatgttcctctccactgccacgttaccccacggaagccccaagtgcaagatctgacgccgacgggagcaaggctgaccactctgctcggtgcccacaagtcgacccattagccgccagtcacggatctcaaacaggtaccgtggatagtccctgatccgaactgttaccagaggaagggtacacactggctactcaggggcagtctgagcactctcgggcctatctttttcctcaccactattttacccatctatatttacaaagtcaattgagagaacaagggcaggcagttgacacagcaagctgaaaaatgacagtgaccctggagcaggtggttaagggcatagcactgagatccaagagacacaataaccttaaagatgactgtgttagctttccctttatgttagccaagcaatttcacggtgaaattcaggaacaaagaaagggaagggaagcccacccatcccactccacccacccaaaacggcacagttcccaatataacctagttcctctgaaatcactgagagctccccagagctcagcgggcaaacacggggtctgcaaataaaggaaacactacttacccagaaagctcttgacattgcacttgagcattcgacaccactgaatgacaagatctaatccctcagggggaaaagggctgcctggatcaagctcttgaacctgttctaccacatgctcaggaccatggaaggaggcatctgccagagctaccagttctagccctgctaagctccaagtaagcagtgcccggcgcatgggtgtgttgccatagagacgacgggaacgctggatgtagatttcaatgtttttgcgttccaaagaggcatagagctcctcaattttgcgggcaggcaacaactccccatgctgcttccgaagggcggccactttagcatccagtagctgtagtcttttggcactctccttactttcatccttcatcagctcgtagttatcatgaagtttcacctcaaaaacatcatccaagaaaacccatgagaagtgctcaacctttaagagtagatcaggtgggagtgggacagggcttggagaggcccaagcacgagtcccttgatgtagtcccttcagccacttctgaactcccacagcctcatctagagttcgagaaaagtcatactgataaggaaactccaccgagactgagccgaaagagaggagccaaacacggttccggagggtctgcagcgcagggaaggggttccggtggaggatcatctcttccagctcaggtagcagctgcacctccacctccttgaagttgaagatactattgccatcaaagccagcagccagctctggacagtatgcctgcagggaacctccatgccggctcagtgacacactctctgcagccagggtaatgaacttgtcctcagctacaaaagctgtgagcttggctgtgctcacctccagggttaggtttagcagccgctttgggggtaatggctcaggggcacggccttctagctcagaagtagttcctgaagtctctagtgcaagggatggtacagtctcaggaaacacagtggctcttagtaggtctcggcactgtagagtggccaggacatgctggtacaggtacatgtgatctggggggctccaaagtaaggtcagccctgcaccacactgaacctttagggagcagaagaaaaggatctgtcaattaccatgtcacaaaacagtagagatggcaaggattatgacacatgcacacctggctcaagaaccatctccacccagaagttgttcctgagtaatcacattaattactgccttgctttgttcctgttagcactaatgtgctgagctgacagttgatagtgtctgacatttaagagcacttatactttttaagttctcttcaactggattctaaattgtctgaaaataggggccatgtgtcttaattctttggtatctaccatagtatactcagtatagacagcaggtactcaataaatcatctggcttcatgtttctgcttatgagttacctttctatcagcaactacactgtctagtaaccactgcaacagtcaacttgaaaaggtttcatgagttgattgcatcaatttaattctcaaaatatagcataataaagtactgagcacacaagtcaatatggcagctgacttacgtaaaagtatgcctcaaggagagagtagtgtctttgtcagcttctgaatagctaagtggacagagaaaagtaaaattccaggacataaaattctcaagttctagtctctaaaaaggaaactcttcagtttccaaaggacggtgaagtctgacaaggaggaactaacgccccaccctcctcctaagagggtcccatgtccatttgttaccctgaggataaagatactggaaagcctctcaaaacctgccagtgcctctatcttctgactccttccagtcttttaatgggccgagggcttcagcaaaataacaccagatcattctttttaaaaagccccttatttttcagagatgcatagtgaaatatttatagttgaaattatatatgtctgatacgtacttacctacttcaaaataatcccagagcctgaggcaggggaaattggtgacagtataattaaaagaagttggtcatgaattggtaattattgaatcttggtatacaaaagcttataaattctctctagttttgtatgtattttaaattccacaaaaagttaaaaacatacgagctagaaaaaataaagaagatcaggtgtcatatttctcatgaaaccagtttcacaacatgagttaaaaagagaggctgggcgtggtggctcacacctgtaatcccagcactttgggaggccaagataggaggactgcttgagcccagtagtttaagaccagtctgggcaacatgtgacactctgttttgggaaaagacaagaaaaaaaaaaaaaaagacagagaaaggctctaagctgaggaaaaaaccagcctggccccacctctccacaggaacattacctccagagagcggatgctgctgtgataggtgatggagagcatggaaaggctgagcactggggtagggatgtcaggggccttgcaacagggttgcatcttctccgtgactgatttcaccagcgctaacacaagtccttgaatccccacagtggacgtctctgcactgcccaggatagttagggtgtccagtcgtacctctgaagcacctaacaaccagaaaccatgtcagccttggttcccggctctcaaagggcaacaatagtcctcactcgcctttctcacttattcccttaactatctttattcctcatgcctccctaagttcatttcttaggttttaagtaaactttccctttcccatcttaacctaactagattcggcagaatcaaagttgttccttaactcctacaaattgcacagagacataccatttactctctagaactaaacacacaaggaaataaaaagttatatggatctctcttgactagatcaaggctttttcttatatgtcttgcttagtacttgcctttcataagcccttaagaaataccaagaagtctaatatttatgcaagactttcaagcatctcgtgcctctaatttagaaaaattccagataatcagcttcattaaatgaggagcagactaaaccaacataatctgctaaggttacacactacacacttcagtatatttatttacttattttattttattttttggagacagagtctcgctcgtttgcccaggctcgagtgcagtggcaccatctcagctcactgcaaactctgcctcctgggttgaagtgattctcctgcctcagtctcccaagtagcacacttcagtatagactccttgtcccacttaccaaccaaggcagaaagggtaaacaagttcatgtcttcgaccttcaagtccaccttccacagtaatgacacagattccccaaatgaagagtgcctagagacagctgacttcccagattgtggacccatcagggataagatacgagacagacattgggcacaggtatctgatgcttccacctgaagtcctcgaatggtacaatcaagaaaaagggtatctgactgggtgctggacaggcccagaggctggttatagctaccctagagaagaagcagacggatcccattagaagtatgcaggcgcacagttttataatgccctaatgcacttcctgctgcattaggatgctcagcgctctgacgcatgacaggatgaggaaagctgtgcaggcccctattcaccaaagccctcacctacctgtagtgtgaaggagtccagaacaagtgcctcaccccaaacatgcatattgggtgggtgtggcgcccgctgaatgtgggagtcactgcccacacgccagcagaggtggtccacagttaggacgccccgctgatggatgctttgtggcctgaggtgctggtaatctgaacaaaggtgagaaagagggattgcatggagccactgtggccatcaattgggcctagctccactaacggacagattcttgttcctattccatctgagagccttacccagagagatagaattgaatcccaaggcaaaaggtggtgtatctccaagttgaatggaaatgttgacattggagatggaggtgctaaagatgatgggagccaggatttgggggaaggttctgcataggaacaagacatcattgtttggtaagaaaagaactgcagcttcctatcatggaacagtttctgaagctctcacaatcagagtgagaattcagagttttattgtgattcttaggacgagacacacctagaagataaaaggctgaactcatcagtttattgctactcttaatggtaatctgcaggaaccccaaaaggatattaggttgactcatataaaattatcattttcataggccaaatacaatgaacaccagcaatactatacgcttgaacctaaaataaccaagaagcatcacttctaaaccataaccttaagttctctgtgcagcacaatagaagcactacacaaagacatgactgccaccttacaatcaaaggcaggcaagacaaagacattccttatcatttaagttcagttcaacaaacatttattttgtataaaacactacactgagcaccgaggacataaaaacaaagaggacagcattctgctatcaaggagtctagtctaatgggaaagatatataaaacaggattgctgttgagactcggatttgaggaggtcaaacaaccaaatacatatttaacacaggatgccaatttggaccaaaagaatcccagagaatccaactgacaagaaggtggctgaaaaagatcagactgacctttttttcctttgctttagaacaggtgaactagacccttgggtttccagtgctagcaggtgcagccagtgagagaattcctggtgccggtagtgaatgatgcaagtgttcagaactagggaggctgagaggtcaatggtggtcacctgaaataagaagaccagaactgtgggtttgggttttatttcacaaactcaaaacgaaataatgtagcgggagaatagagaaaggaacaattcttggtaccacaatcatcacacctgcacactagccttgagggagttgaggcagacaatgcgttggcgactctgggacaacaacaacccatctgtaagaggccagaggacagatcagaggagagcactggaagggcaagaggtaaaactgggagagggtcagaagccggcaaagggatcaacagactgtcatcaaaacttgtgagctggggctattttctctcagtatgttccctccttccactccccagttacactgagattagattaaggagaccatatggggcatgagcaaagagagtatctagtcctcccattctcgctcagtaccagtaccccgacccatgaaccttccagcagcagttcagtgctcatctgtgccatatcagagtttgctgtgaagcttcgaaggggcagctgatcctcatcacggtggtacaggaactgcagcagcttcagagtccaagtcaggtgcctggaccgagacagattccagctcaggaagatgtggaatgccattcctacttcttttacttttattttttaaaagtaattattttttggccaggcgcagtggctcactcttgtaatcccagccctttgggaggccgaggcagggggatcacgaggtcaggagatcgagaccatcctggccaacacagtgaaaccctgcctctactaaaatacaaaaaattagccgggcgtggtggcacgtgcctataatcccagctattcgggaggctgaggcaggagaatcgcttgaacctgggaggcagaggttgtggtgagccaagatcgcaccactgaactccagcctgggcaacagagcaagactccgtctcaaaaataataataatttttttaatttttcccacactacatggatgtaaccatttctacttcctttctccccgtagacaagctcagcaaatactaggctggttacagagataccaacatacagctcccactatcactctcccatcttctgtgtcaggagagacctcacctcttttgactattcatggacaataccacgcttgtgttctccatcttaaccttgacctggtctggcagctgctggagaaggaataggccaggcagagttggctcaactaagttttctgtcacctctgaaaatatgaatgaataacgtaagaaccatcaattcttaacactcccagttctcccgaaatgccctggcctctatggtcaaatcctcccacataaagtaggctaagcaaatgcctaagctggatggaccataaggcgaatgccccagagatccaggcacctgcagtacttctttctccagtctctaaaaacctaaagagtacaaggagcaggttggtaaatgaaaagaatgtggaccttagggccaaataatttaaacatcatttttactactgactgcctgtatgacttcagtcaagttacctagctaaccttcctaggcttcagtttccttatttgtgaaatgctgaggatttagttagagaatatacagtcatcctttggtatccttggagctttggttccaggaccccctgcagataccaaagtccgcacatactcaagtccagcagttgtccctgtgggaactcatgtatacaaaaagtcagccctccatattggtgagtttcatatcctgcaaatattggcattttccatccacacttgcttgtggatgcggaacacacagatatggagagccaactgtatttattgaaaaaaatccacataagtggatccgcacagctcaaacctgtgttgttcagtggtcaactgtatataaaacacatagtacaaggccaggcatggtggctcacgcctgtaatcccagcactttgggaggccaaggctggcggatcacgaggtcaggagatcgagaccatcctggctaacacggcgaaatcccgtctctactaaaaatacaaaaattagccaggcatggtggcggatgactgtaatcccagctactcaggaggctgaggcaggagaatcacttgaacccagaaggttaaaggttgcagtgagccgagatcacgccattgcactccagcctgggtgacagagcaagactccatctttttttttaaaaaaaaaggaaaaaaaaaaaacccatagtacaggtctaactcatgataggtgcccactcaatgctggttctgccactcagcacaagcaaatgccctatttcctctaactatccttagggtcaaagtccatggtgactagtgaatcacatctaaataagcagtgagaccactattttttctacttccaaaacaaaccctgagaacaaggcagccaagaagctcaatcactggggctttacctgaacagggaacaggcttagatgctaggcttgggccctggcacagcagttggctctggaagaggccctcatgcagttcagcatggagtgtccacacatccacagtgatagcagtgagatgccgactgctaatgcccacctttagacacaggtccagggccagtgaaagctccactaggcaggtgtcctcctgtggggatgataagcctctaaggtgtatgtaagaaagtttggaagttttaggtcaaaatgtggtgatctggaacactgggtactgacttgagggaaccccctaaggtcaaagaacctaggatgtaagccctaagctccttcacactttacgcccaggaggaaatgaggcatctgaatgatcatggcatacttaccagctgaccactctttagaactttgctgttgatcttacataagctcacctcacagattagcctgggaaaggaaaaaaattaagagcacttggccttgccgggcgcggtggctcacgcctgtaaccccagcactttgggaggccaaggtgggaggatcatgaggtcaggagatcaagaccatcctgactaacacggtgaaacctcatctctactaaaaatacaaaaaattagccaggcgcggtggcggccgcctgtagtcccagctactcgggaggctgaggcaggagaatggtctgaacccaggaggcggagcttgcagtgagccaagaccgcaccactgcactccagcctaggcaacagagcaagactctgtctcaaaaaaaaaatttaaaaaaaagagaacttggtccctttcctcaccacttacctccagtcaagctctggtggctagaagggacaaggcaattggaaatgtctaatcttagcatctcctccaactgcacagaatgagaacttaacaccttgataaggaggccctgaagcaactctgaggcaagaataggacggctagatcctctgctccccagtgcttaccttttcccatcactatccaaaagaaatctgcttctactgatctgaatatgccataaggactcagaggtatccaccttgagaaccatgatgtttatagcatctacatgaatggagaatagctggaaggaagaagcaaggatgaacaataattaatgttaaggaactgcccttcctttccagatgagaaagaggggcagctcttagcattatgccctaaaaacagaaaaatctacccataactccaaagccaaccatgccaaagtacagtccaggatagcaggagaagttgtctcacttggcagaagatcttcaataaggatgggctgaaggacagttccttttgatccaccccagcgctctgggagaatggggcagacaggtcagaaactttctgtaggtccgttctgatacgcacttctccaaagcacaatgccacatagtgtctgcccagaagagaaatctcactgccaccaggtccatccctcccatagcagtctattccccaccctcacattcactttctcatccttcctagaaatatagctcaaatcacagagattagtttcatagcagttatcaatatcttcctcacaacacaatggcacccaggctaacaggaagacttcagcaacaacctcccttcctccttggattgtgatgcctctgcagaagagtgtcactctgcaaacaccaactccaaagtactcttctaggggagaagtgagaatatagggtactcacggaagatcatggctaaggagtttgctggaaatccacaggttatcaatttcctaaaacagtgagggagaaagctctgtgtgctagctgctaaataagccacgagcagcttgacaagccaggaaatgttctggattattagaatttctctttcatagccatgttgccttgaatcccatcttaaattagaacagtaaaatcttcgatttcctgttatctttcttctgtatctttgttatgtgccctggacactctgtgtcctacaaacatttttaactgaacaacttgcagcgttctccaactagctctaagatcatcttggcaaagaaatggcaaggctgggattaactagaaaagccaccaggatttctatttttaaaaaaaggaaattaagagtttaaattcaattggatcaaccctacacacatatccagagtttcccagaactcaccactgtttgctggtgttgctgaaacttaagactgacattctggatccaaaaaaagcggaaggagccaatctttagctccgcctgcagcttccgctgacaccacttggtggccaaccggaccacaagccacctgcagaaaaattcctgttaattcataggacctttttccaatgatggtttccctcaccccttgctggtctttcaaagccttgcaaaaggtcgttcctgaaactggatctgagcaactctcctttcttccaaagcaccactctgtcatatacattcagccacgctgatcaagatcctagctcccgactgacccctccacccagatgaaaccagaaactgcaccctctaagttgaagacaaaaacaaaatccctcaaattgttatgaatcccagaggcagagagagaagaccccagcaagagtcaaagcggaggcggctctgtcacatgtgccatcacactccccagagggtctgtctgtctcctgctcccaccctccagacaggtatccacgagaaggcactttgaggtcagacccggcagctcgaatgctgttctccccagaccgatgctgcaggtgcccatcgcgcttggcgaaagggacatgcaggggtgggtggagggggaaagggaagccactgaaccaggccccttcctcacactcctattcagttcctggcctcagcatttcctcagaccccgcccgcttcctcagtctccccaactcgcagcccatccctgggagctcgggccacgcgcctcctcacgatccctcccctcgccgcgcgccccctccctccaccctacccactctgcctcacgcgcctcagtaaggcgcgcgccccctcctcagtctttcttcctcctctccgccccctccctcccgccgccgccgccgccgccggcgcggccgggaaccctcaccggcctagaaagagggcgctaagcgcaactagcagcaagaccaacagcgcggagaagaacagaggcatttaggtccgggtccggcccggcttggccccggcccccgccatgccgggccccgacgccggatccgcgcagcaccgccgcgggccgaccagctgcgcgcgcaggagcaacgctgagcgaggacgcgctggtgcgcacacgagccccgccttccgcagcccgccagccaaccaacggcctcccaccccagtcccgccctgtcctacgacgctgcagggccgacgggctgcgtgcgcgaggagcgggcgtggttccgggaggagggcgagggggagcggaccaagagctgaaacacgccccgggcgcacaccacggtgcccggaaccgcggggctcggggacccgcgggggtcggagtccgggcccactacctgggctggcggtggacctggctgactcatttcggtccggggagctcactttgaggggagttggagtccgcctagccacttaggcctggactcagggttctgcggaagttacacccctggtcagacgtggtagcactcccatcttattcaagatcctgtttgaaaattactgaggcagaaactaggaggtaattaaaaggcctcaaaaatctcgcctcattccatccacagaggaaactaatgaggttttgttttttttttctttgagacaaggactcgctacgttgcccagtctggtctcgaactcctgcaggctcaagggatcctcctgcctcagcctcctgagtagcttggactaaagacgcgtgtcacggttcctggccaatgagtttttacttcatttactgtttgaacactgttctggtccatctacttatggcacgaactgggccctgatggaggagaggaggagatactgcagaagtagtgaatattgttcttgccctttagcaaaaaatagtttatctgggaagcaaacataattacataaagtagacaatacatagtcagttttgcctgcttccttctgtgtagtttatctgggaagcaaacataattacataaaatagacaatacatagttttgcctgcttccttctctgtaaaatgagagaacaggacaaaggtccctcagcgttactgtgctaaggatcagtatctgaatgatgatctactgatacagcacaagctaaggaaatcctgacggtttcaaaataagtattatggaggaggtcatgtctcttttcataccccttcgctcccacgtcctaatctccatatatatccttcaagattttactcagagcctctctttttggctccctcagataaaacaccatttcatctttcacctgtgtgttgcccgaagttgctttcactcctctgattgtttcctcccttatctattcctctcttcagtgatttcacatctccccaagagctccagcgctgctgtttcaaggtcatacttacctctcaagcactgtatttgcgtcatcttcctcgtcatctgcagccttcccccagggtatgtcctccgaatgctctgggaaggcccaattcactgaaaacctctgtccaagtcaaggaggggtgccgtgcaacacgtatccctactctggttcatcttatccaatctgtttattgaaccaagattcctgtcacttccttccttctcccttgactattaccggccctactcccagccatctcatagcctaaaatgttgattttatgatttgtctatttctttctggagagatcttaagggatcaacacaagtgaagtggaataaaggcagggagtcgggggtggggggtggttgaggcaacagtggggctcaactaattcatggcctccatttattgagaccacaagcccttgtaaaagagaccaagtcttttaacgtcacgggccatgtttggcacagaaatggtgtctctaaatgttcaacattaacaaaacaaatagaaaaaaaaagaacaaaacccggaagtttctaaaaataaaaaaagcctgctagtcactgaaattccagcagatggcagccatctccgttcaccaataccatgattggaagctacaggagcaaattttctgcaattgacacaggaaaggaggaaatcaggtaggcagaggacaaaagtagttttctatccacctttttagagagatatatctacgtttgtccaaaaaacaggatttgttttccaaaagctaaacacaatcgtagtgcacttaaaaaaacctgagtcagaaacagctggattcctattccaaaatgatttattagttttaagaattcaggccgggcacggtggctcacacctgttttcccagcactttgggaggccaaggtgggcggatcacaaaaggtcaggagttcaagaccagcctggccaatatggtgaaaccccatctctactaaaaatacaaaaattagtcaggtgtggtggcgggtgcctgtagtcccagctactcaggaggctgaggcaggggaatcacttgaacctgggaggcggaggttgcagtgagccgagattgcaccactgcactccagtctgggcgacagagtgagactccatcttaaaaaaaaaaaaaaaagaattcaggcagtaggccaggcatggtggctcactcctgtaatccccagcactttgggaagacacagcataaggatcacttgagcccaggagttccagaccagcctgggtaacatagtgagacctcatctctacgataaatcaaaaactgacacaggaggatcaacttgagcccaggaggtcaaggctgtaataagccatgattgtgcccctcccacctaggtgacagagcaaagaacttgtctcaaaaaaaaaaaaaaaaaagaattcaggcagttactcaactgctgcactgataaaaatgcagtattaccctatatgaattctgtgaagattaaatgaggtaagatctataggccgggtgcggtggctcacgcctgtaatctcagcactttgggaggctgaggcgggcggatcatgaggtcaggagatcgagaccatcctagttaatacagtgaaaccctgtctctactaaaaatacaaaaaaattaccctggcgtggtggcgggtgcctgtagcaccggctacttgggaggctgaggcaggaggatggttgtgaacccaggaggtggaacttgcagtgagccgagatcgcgccactgcactccagcctgggcgacagaccgagactctgtctaaaaaacaataaataaaaaaaaagatctataatatggtacctagtatttagcagtgaataaatactggttcgttctttctacccctacacctttttctcatctgcagtaacagatacaaagcaaacatttcactggctatttattatgctgtattctctgagagtttttagctataattagtcaaagatctattaaagatgagatgcctggagagaagtcaaagtagagggagaaaaggtttgtatgcaagaaaagctcttaaaagggcccacattggagcttcatagcgtctccaaagagtcttaggactcaaaggattaagcagctaatgaaatagcacacctaataaataacaacacagtgactcataataaaattattgtttttatcattttggagagagaaaatagggggaaaatcacatacattaacagtccatgatgccaagctcctgaagagtaaaagtttcccagctaagagggatgtttccctcagtttgttttatcagtactaataaaaagcatctgcccctttaccagcaagtcctctactcagaaagaactgacccacgcaagtctgggagagtgactagttcaaatgtgcagggctgaagcttccaaacacagccactattttctgttgtatatcttcatctcaatggtgacatggccactgcccaaggaacttgtggcagggatcccaaggtgaggcagcaacagatgtctgtgaacattgtgcgttaacagtggctcagagcctctagattcacagctctgcatggtgggcttctgccttcaacaactcactgggcttcatgaagatgccttccatggctttccagtagttgttctgacttggctgggccatgccatgcacctctttttgcccactgataggtcgaccatattgttctcctgtgacagacagcagtacctcagtggaagagtgtttgaaccgcacctcaccatctctcacccagtagggtccattacagagcactgtccagtcatccagataatcaccttcaccttcctcaccaaaagcactcacttcctagaaaatacagaaggtagtaacatcagcatggctgacaagggcttgaaaaggggtgggaggcaatgggaagaaaaagaaggccaccttgaagtaaaaaatcagaggggccaggcttatgcctgtaatcctaccactttgggaagctgagcagggcagatcacttgagcccaagagtttgagaccagcctgggcaacatggtgaaacgctatccctaaaaaaaatacaaaagaaattagctgaggtcaggagttcaagaccagcctgaccgacatggagaaaccctgtctctactaaaaatacaaaattagctgggtgtggtggcacatgcctgtaatcccagctactcgggaggctgaggcaggagaatcgcttgaacccgggaggcggaggttgcggtgagccgagatcacaccattgcactccagcctgggcaacaagagcaaaactctgtctcaaaaaaaaaaaaagaaaaaaaaaaaagaaattagctgggcatggtggcacatgcctatggtacccagctactacagctatcacctaagtccaggggatcaaggctgcaatgagctgtgatcataccactgcactccagcttggattacagagcaagaccccatctcaaaaaaaaaaaaaaaattcagctgctttccagtgttgttattttatttatttatttatttatttattttgagacagagtatcgctcttgttgcccaggctggagtgcaatggcgcaatctcggctcaccacaacctccgcctcccaggttcaagtgattttcctgcctcagcctccctagtagctgggattacaggcatgtgccaccatgcccggctaattttgtatttttagtagagacagggtttctccatgttggtcaggctggtttcgaattcccaacctcaggtgatcctcccgcctcagcctcccaaagtgctgggattacaggcatgagccaccgtgcccggccactccagtgttgtttaaaccatgaaccatggaaaaagacgaaagacataaaggacataggaggaaaaaaattcattgctataagattatggtccatggttcttatctgagtcatggcatcaaaaagaaaggaaaaaaaaaagattatggtccaaacacttattttgcaattaatactataattgccttatattttctattacagtgttaaaacagaatttcttttttttttctttttaagagttgggattgtggccaggtacggtagctcatgcctgtaatcccagtaatttgggagggcgaggcgggcagatcgcctgaggtcaggagttcaagaccagcctggccaacatggtaaaaccccatctctactaaaaatacaaaaattagccaggtgtggtggcaggcgcctgtaatcccagctattcgggaggctgaagcaggagaatcgcttgaacctgggaggcggaggttgccgtgagccgaaggttgcagtgagccgagattgcaccactggactccagcctggatgacaagagtgagactttgtctcaaaaaaaaaaaaaaaaaaaaaaaaaaaacagttagggtatcttgctctgttgcccaggctggagtgcagtgcctcaagtggtcttatggcctcacctcctgagtagctaagacaacaggcatataccaccacacccaggtaattaaaagttttttggtaggcaactgtgttgccttggctggcctctaactcctggacttaaacgattctccccacttggtcttttagggtgctgggattacaggtgtgagccaccgtgctggctttaaaatactttacttttttgagacagcatctcgctctgtcgcccaggctggagtgcaatggcacaatctcggctctctgcaacctccacctcttgggttctcatgcctcagcctccagaatagctgggattacaggcatgtgctaccacacccagctaattttggtattttttaatagagatgggggtttcaccatgttgaccaggctggtctcaaactcccagcctcaagtgatccacctacctcagcgtagtaaagtgctgggagtacaggcatgagccaccacattctgcccttaaaatactttatatctcttgttatttgactttaaatattactgcttcattctcttaactagattttaaatgacctgatgacaagttcaaaagggaatggactctgggagtcaggctgaccttgaatctcaacttgatcccttcttctgtaaatcctttgagcctttgttttctcctctataaaatgatcacaatatcaccttacagagcaactgtgagaattaaatgagatagcaaatattaactgagcaaaacatagcaagttttctacattcttttctttctttctaataaggcagtgagagagaaagcaagttctctatattctactcctcatctaaatcccatcttccttaaggccaaatattcagtttctatacgatggcaattaaaaaattactgattatttcagaagtgtgtgtgtgtgtgtgtgtgtacactctacttgataaaattgttcccaggagggtaccagtatgtaattctgatactgctatatttgtatactggaactgaactgaagttcaatacatggatggcagatggtaggaacaaggtatcttactgttggagtgggaatttacaaattagcacagggaggaggctaggacgatctatgtggtaatggattacagctaaagacatcaataagaacactagccaggcacagtggggcatgcctgtatccccagctacttggaaggctgacgcaagaggactgcttgagccaaggagttcgaggctctagtgcactatcatcacacctgtgagtagccactgcactccagcctgaataacacagcaagaacccatcttaaaaaaaaaagaaaaagaaaaagaaagctcatttaacttaatatatgtagatacagatggctatgcaaataaaaatttatagatatgtaatatatacacgagtaagcacacacaggtaacaattctttatttttttaatttttttttgagacagagtctcgccctgtcacccaggctggaatgcaatggtgcaatctcggctcactgcaacctccgcctcccaggttcaaacgattctcctacctcggcctcccaagtagctgggatcacaggctcccgccaccatgcccagctaatttttgtactttagtagatacggggtttcaccatgttagccaggctggtctcgaactcctgaccttgtgatccacccacctctgcctcacaaagtgccgggattataggtgtgagccactgcgcctggcttacagttatttattctgtcaagtgagagggcctaaaagaaacactccagtagcaacaagcttacataaggcctagaacttggttttaatatcattctccaataaaaggaagcagagctccttggagaaacagctgattctagtactggagcaagaaataaacaagatgagcctggagcatcttttggtgccagaaaggaaagaagtgctttaaagtgcaggcacatatacacaaaaacacaatgggatactgccaatggacacaaagccagctgaaagaattcccaatggccaaagttggaacaatttgagcaacaaaatatagtagcattagattataacgaagtataaactatccataagtttatactaatgtaaataactgaataaataaataaattggggaaaagagacaaatccccaatatggaaaaatcccaaataaaatatgtagatattccaccctaatgtagacagagtataactctccagtctgtaagagtgaaatgcacatagtgactttcttccaaaaagtgcatggaaagggggaaaatgaaaagaataactttacaggagaaacctaacgaacaaacactacttcagccaggtaatcaaggtccacatcaacagtcataaatcataaagatagtatgtacccctgatatgatgggatacaaatggcactttacctctgtgatcttcctcccaaaccctttataagtccggtctaatcacaagaaaaacaaattccaacagaggggcaatctacaatacacctgaccagcactcctcaaagctgtcaaggtcatcaaaaactagggaagcctgaaaaactgtcacagccaagaacagcctaatgagacatggcaagtatatgtaatgtggtattttggaatggaaaaagaacattaggtaaaaactaagggaccgggcacggaggcctcacgcctgtaatcccagcagtttgggaggccaaggtgggtggatcacaaggtcaggagctcgagaccaacctggacaacatggtgaaaccccgtctctactgaaaatacaaaaatcagccgggcgtggtggcaggcacctgtaatcccagctactcaggaggctgtggcaagagaatagcttgaacctgggaggcggaggttgcagtgagctgagatcgcgccatagcactccagcctgggacagagcgagactctgtctcaaaaaacaaaacaaaacaaaacaaaacaagggaatcagaaaaaaactatggtctttagttaataaaactgtatcaatattgcttcattaaatatagcaaatttacccttcgaaggtaagatattaatagggaaaactgcatacaggggctggggacagggaaggagtcattaaggtgtccacatcccctgacaactcaaggcttaaaacagtggcacaaggctgggtgtactggcttatgcttgtaatcccagcactttgggaggctgaggcaggcagatagcttgagctcaggagtttgagaccagcctaggcaacatggcaaaaccccgtatctaccaaaaaaaatacaaaaattagccaggcatggtggcgtgagcctgtagtgagggctgaggtgggagaattgcttgagcccaggaggctgaggctgcagtgagcaagatcacactacaacctgggtgacagagcaagaccctgtttaaaaacaaaaaacagtgacacaaaagcaaatctattttcctaatgtaactagttagcatcattaaaaaaaaaaaaaacactgcaagttggaaaacattgggtttctttattgcagaatatcagaacttatgatatgctgatgtatacccagtctgtctgtccttcccatttcttgatttggtttagttgttgtctccactttgaccagaaacaattttcttcacacttataaaacaaagccggctgggtgcagtggctcatgcctataatcccaacacttccaggaggcagaggcgggtggatcacctgaggtcaggagttcgagaccagcctgaccaatatggtgaaaacccatctctactaaaaatacaaaaatcaggccaggcgcggtgacttgcacttgtaatcccagcactttgggaggccgaagtgggcagatcacaaggtcaggagttcgagaccagcctggccaacacagtgaaaccccatctctactaaaaatacaaaaaaaaaaattagccaggtgtggtggcacacgcctgtagtcccagccactcgggcagctgaggtgggagaaccgcttgaacgcaggaggcagaggttgcaatgagctgagaccatgccattgcactccagcctgggtgacagagtgagactccatctcaaaaaaataaaaataaaaacaaaaattagccaggcatggtggcatgcgcctgtaatcccagctacttgggagactgaggcaggagacttgcttgaacccagaggcggaggttgcagtgagccaagatcatgccactgcactgcagcctgggtgacagagtgagactgcgtctcaaaaacaacaaaaacccacacaaaaatagagccatttccccaggtctgcacaaaagagaacatctacacctagaaaagaaacatttaagaaccaagagatcaaacaagcacccactgagtaatgcagagcagcaacaatccatcgaaagccacctcacctggtttccagaaagaggtgaagtgaagtggtgactatggaggtttcggccagtgttgacatgtgtcagccggatgggctggccacacttgatgggggttcccctctcacacactgtggcactcttcccccgtatcctccagtaactgttgctgtcatccacagaggttacacctgtcactgactgctgcccactacctgcagttaagaaaagaaaggcaactctctttctctgccatggacaacatgctcagagacagaagcttgagtgcgctcaagattcaccttcacctgtaacccaccaccatgaccaaggaagacacgctgctggaggtgtaatggatattaatactgctctacaagagactgaagaccgccctcagccatgatggcctagcaggtggaacctgcaaagctgccaaagccttagacaagggccaagcccatctttgcgtgcttgcatccaaatgtgaagagcctatgtatgtcaagctaggggtggccctttgtgccgaacaccaaatcaacccaattaaggttgatgaccttaagaaaccagagacatggctaagcctttgtaaaactgatagacaaggaaaactttgtaaagtggttggttgcagttgtgtcacagtgaagggctacagcaaagaatttcaggccaaggatgtgactgtgtacttcaaatgcaagaaattaacaaataaatttggtacccattcctcaaaaaaaaaaacagcaagtgagctcagcctcacccttcttgcctatggccaatattgtgccgtgtcattaaacaggtaagaaggggtggggagaaaaatgctatgcttggcaatattttttcttctacaacattaaaatatttataaaaaatacaaatcatactgggcgtggtggctcacgcttgtaatcccagcactctgggagtgaaacttgacctcccaaagtgctgggattgatggtgagccactgtgcccagcctttttcttcttttaaataaaaaaaaaattttttaggctgggtgtggtggctcacacctgtaatcctagcactttttgggaggctgaggcagttggattgcttgagcccaggaattcaagaccagcctgggcaacatggcaaaaacccatctttactaaaaatacaaaaattagctgggtgtggtggtggcagcctgtaatcccagctatctgggaggctgaggtgggagaatcgcttgaacccgggaggtggaggttgcaatgagccaagatcgcgccactgccctccagcctggatgacagagccagactccgtctcaaaaaaaataaataaataaactgtgtccacgtaatactagttactatatgataaagtatacttaagggtatgtcatatcagaaaattctaagaatttgcatcaaaggatatccaaggcacaaatctatgtgagttttttgaggcacaggcagtggtaacctatacacactagcctggatagcccctaatgtgtctaatcacataattttaacatgtttgtaatattattcatgttcattaactattatgataaaaatttttgtatttcacaattaaaatgagactatgttgccaactttaagcagccattacagctcccaactcccataagtggtcaattattataaacgtattatttaagcaaggcacggtggctcacgcctgtaatcccagcactttgggaggctgaggcaggcagaacacaaagtcatgagttcgagaccagcctggccaatatggtgaaaccccgtctctactaaaaatataaaaattagctgggcgtggtcgcatgtgcctgtaatcccagctacttgggaggctgaggcagaagaattgcttgcatccgggaggcggaggttgcagtgagccgagatcacaccaccgcactccagcctaggtggcagggcaagactctgtctcaaaacaaaaacaaaaacaaaacaaaaaatgtatccttggaggtctggcacagtggctcatgcctgtaatccaagcgctttgggaaggtgaggggaggatcccttgagtccaggagttcgagactagcctcagcaacatagcaaaatgcagtctctaaacgtacatatatatatatgtattttttttttttgatacaggatccctcttgtcactcaggctggagtgcagtggcacgatcacagctcgccacagccttgacctcccaggctcgggtgatcctcctacctcagcctcccaagtagctgggatttcaggcgcctgccaccacacctggctaatttttctattttttgtagagatgggtttttgccatgttgcccaggctactctcgaattcctgggctcaagcaatccaactgcctcagcctcccaaagtgctaggattacagatgtgagccaccacacccagcctaaaaaaaaatttttatatttaaaagaaaaaaaagaagctgggcacagtggctcaccgtcaatcccagcactttgggaggtcaaggtgggcagatcgcttgagcccaggaattcaagaccaagcctaagcaactgacaaaactccatctctacaaaagatgcaaaaaattaatcaggtgtggtggggtgcacttgtagtcccagctactcaggacgctgagatgtgaggattgcttgagcccaggaggtcaaggctgcaatgagtcgtaattgtgtcactgccagttacacgggtaaatgtagccaactatcagctcctttcatgactttattatatcttttttcagaaaaggcaaaccaagtctcccttcctacttctggttactgccttacagctctctgggtcctcacagccacgcttcactaaaccatggtctacattttgtctcctacattttctgctttctattcaaccgttcacttcttcctccaaatccttataccttgggattatccaaagttctatgcctggccttcatctgtttctacctgtagtttttttttttttttttagtatttattgttcattcttgggtgtttctcggagagggggatgtggcagggtcacaggataatagtggagagaaggtcagcagataaacatgtgaacaaaggtctctggttttcctaggcagaggtccctgcggccttccgcagtgtttgtgtccctgggtacttgagattagggagtggtgatgactcttaacgagcatgctgccttcaagtatctgtttaacaaagcacatcttgcaccacccttaatccatttaaccctgagttgacacagcacacgtttcagagagcacggggttgggggtaaggttatagattaacagcatcccaaagctgaagaatttttcttagtacagaacaaaatggagtctcctatgtctacttctttctacacagacacagtaacaatctgatctctctttcttttccccacatttcccccttttcttttcgacaaaaccgccatcgtcatcatggcccattctcgatggtcgctgtctcttcggtgctgttgggtacacctgcagaaaggctgtcacttcacacttggaagactgcacagcggccaggcagaggcgctcctcacttcccagacggggcggccgggcagaggcactcctcacttcccagacagggtggccgggcagaggagctcctcacttaacagactgggtggccgggcagaggcgctcctcacatcccagacgatgggaggccggacagaggcgctcctcccctcccagacggggcggccgtgcagaggcgctcctcacttcctagatgggacagccaggcagaggtgctcctcaactcccagacgaagggcggccgggcagaggcgctcctcacatcccagacaatgggcggccgggcagaggcgctcctcacttcccagacagggtggcggccgggcagaggcgctcctcacatcccagacggggtggcggccaggcagaggcgctccccacttcccagacggggcggctgggcagaggcgctccccacttcccagacggggcagccgggcagaggcgctccccacttcccagacagggcggccgggcagaggcgctccccacttcccagacggggcagccgggcagaggcgctccccacttcccagatggggtggcggccgggcagaggcgctcctcacatcccagacagggcggccaggtgctccccacttcccagatggggtggccgggcagaggtgctcctcacctcccagataatgggcagcccacttcccagatggggtggcagccgggcaaaggcactcctcacatcccagatggcgcggccgggcagaggcgctcctcacttcccagacggggcggccaggcagaggcgctcctcacttcctagacagggcggccaggcagagacgctcctcacatcccagacagggtgatggccgggcagaggtgctcctcacttcccagacggggtggcggccgggcagaggccctcctcatatcccagacggggcggccaggcagaggcgctcctcacatcccagacgatgggcggccaggcagagacgctcctcacttcctagacggggtggcggccgggcagaggctgtactcttagcactttgggaggccaaggcaggcggctgggaggtggaagttgtagtgagccaagatcacaccactgcactccagcctgggcaacactgagcactgagtgagcaagactccatctgcaatcccagcacctcgggaggctgaggcaggcagatcactcgaggtcaggagctggagaccagcccagccaacacggcgaaaccccgtctccaccaaaaatacgaaaaccagtcaggcatggcggcgtgtgcctgcaatcccaggcactcggcaggccgtggcaggagaatcacgggagccccaggcagggaggttgcagcgagccgagatcacggcagtacagtccagcctcggcaacagagggagaccgtggaaagagagaagagacaagagagggagacggagagggctacctgtagttcttaaacaattgttgagggtcaggacaaaagcatttgtatttttaacaagtttctccagttattcaaattaatcccagatagagaatcacagttcattctgggcaatttcatctacaaccctgacatcttcaaccacagtctgtacaagatgttatatttaatgttgtatctcaggctcagcacagatcccttttctgagctccggactgaacctggttcccaaatctggctgtccatcagaaccacctgaagagctttttaaacctacagattgctactgccaagcctctgtccacctccactctaattcagtagatccaaagtaggaaaccaaaacaaagtaaaaaataagcctgacaacatggtaggtgttcactgaatgggtgctagaattattaagacatcgcagtgatgataactcatgtccttgcctagtctgactgatcagatgggttttgggaatcatgaaccagactagcccacctgacagaactctttcctccctcagcaaacagcatcatcagtcattcaagacaaaaatctaccagctatcttagatgcctctcacatctcactagctgaccttcattctttttttttaactttatctttttttttcaggcagataagactttctttttttagtctgtttttattatattgtaattttcttgactgattatcaccaccgaatctcctgtatgtagtacaattctagccatgtagtaggaactcattaagacctatgctgaatgaatccacaaataatttattactaaacattttaatttcaaacgctaaaaaaaaaaaaaaaaaaaagcagttttctctgcaattcctgtcactgctccaagtttcttacaagaaggaggttaaggtttgggtagaagggggccaaagatggaaactgaggagcaagtgtaagatgcagaagagctggaagacaaagggttgtagtcaacgagtgagctcttggagtttaaagtttcacagacagtacttactgtaactttaaaatttcagacacagcacttactgtaattttcttgtctctaaagcaggctttgaacctggatagatttggatagaaccccgactttgtcatttgctaactgcaaggctttgaataaacgatttaatttctctgcgtctgtttcctcatctgtgaaatgaggataacaatactgtccaccttacaacaatgttaataatcggaaaaaggacataggtaacgtgcctggcctgtagctcaccaaatattaggtggtgttgcgattaagatgccttagaacaattcagttctccgactctctagacctgaggaaccttcccagggaacccctaactttcccagaccacactgtcagatattctataggccccgcccctccagagcctccgagtcctccctagcccacccgagcccggtccccagcattacctgacccatagcgcacgtcgtgtgagtgcagtcggacgttgtggcgcgtattgagtagcttcaccacggagccgcaagtaacgacacccaggctggacgctcccacagcgctccacaaaccccccaacaacagcagaggtactacagccatcctaactgtatcgcggagccccaaatcttcgaagaaaactcggcccctccccggaaccggaagctaatggcgaaaccacggagagaaggaagtgaagaagcccgagtctgatctttatggtttatttgactagagcggcctgagaaaccggctgagcctggttacttacgatactctcgctctgttccaggggctcagtgacagctgccttcctgagccgcttcggttacctttcgcacccacgagacgaaagcttccgagagcgggagagagaacaagaaatggcccgcccactcccggtgacagggagccggaaatgacgtagcacgttgacgcagcagcggcggcggtggcggcggaggggccgtgcggtgggtccgtactatcttttcccagtctcggttcgacgactccattttcctcggtgggggcttagcgcactggaggagcggcgggcttcagacaggtaaagttccgactggagagcgtgtttctcgcaggagtcaggtggggaaccgggctcctagggcctggtcacgtaagggaagaggcagtggggagccgtatgcgggaagaagggggagcctggccttccctgctctatggggggaagggggaggaaagcgctgtagttgctcagagtccgaaagcttttcccagcccagtgacacccggaacccgtgaatcgggtggcacgttgaatcaacaggcttcctggcatcccgtccttctctccgcaggtttttaaaactgggccacgcaaaaggattggggatggaagggacctggggcttctgagccaggatcaggtgatcgagttgtttgttctggggatatgaatcctgtggagctttcagcagctcggccatcaggctagagggcgatgccaaattccagctctttacatattgctgaataatacaaatagaactttttgtagatggttgcatccttcatccctttctaaagatcgaaggtcttgtagaagtcctaaagcccgtccattctctatagattcatttcctcaaacgtttgccagaggcctatcatgaacatcaaaattagttattaagtcaaaactccatcttctagtttctacctttctcctcaggcactcctttgaaccagctggagaagttaattttcctgggttgttgcaagaactgatacttatttcagagggctaagatctctgaaaatacttccgtggaaattcactgtaatatcaaaagtaacaagggtgtatgaagctacatcattaatgagcattagggagtgtaaacaatattgaatttgattaatttcttcggaaaaatgtctggttccactgtttatctggaagttaccagtttgtaagtcttcagtgttttgattacagaaacataactgctcttccatcagctgtgaatttagagcccttttttacgagtaatgtccctttcaccagtacaagtacatttttattcacttggcttgtgtggctgctagattggattagcatagccttgcaactctaggaggttttaacttcatcaggagattaattacatcagaaagtggtaccgtctggagaggcttagtcaaattttacagttcttcctctgaaagcctacctagtgtggtggaaacatgatctttgtaggcaaatacgtttgccctgattctatattcttgaccttaataaatggcactaccatcagtcctgcctgtaatccttgtcttccttcctgtccactatttcccaataaaatcagtcaccaaatcctgtctctccctgaaactgttcccatcagcatacaaattatgttctggtatccttcacatccctctccaattaccatgccaattttttaaatttccattcatagatttctacctgtaccaactcagctttctcaactttcattcactcttcattttataccaatctggcttctcttctgcccactccatttttttttttttttttgtggagacagggtcttgctctgttgcccaggttggagtgcagtggccccatcatagctcactgccacctggaactcctgagctcaagcagtcctcctgaggcagcttctagtaatcaagtgccaccacatctactttgcccactccattgaagttgctcttatcaaggtcaccagtgacttctatgttgccaaatccaatggatactttgttctcatattcctctgtctctgcaatattcaacatagttactcctgcctccaaactttcatcttggctttattgacatttcactcttggattttctccatttctccggctgttccttctgagtctcatttgctagcaacttttgctctctatctaatgtctaaatgctggggctggtcgcagtggctcatgcctataatcccagcactttgggaggtcgaggtgggcagatcacttgaggtcaggagttcacaaccagcctggccagcatggtgaaaccccatctctactaaaaatacaaaaactagccgggcgtggcgacacgcctgtaatcccagctacttgggaggctgaggcaggagaatcacttgaaccagggaggcagaggtgcagtgagcagagatcatgccactgcactccagcatgggcaacagaacaaaactccgtctcaaaatatatgtatatctacatatgttggaattctcacaggaatcccgagccttctacatgcttccctttaggtaacccagccccatggctttaattaccacctgaaagttggcaactccaaagtttaaatctctagtccagccctctcctctatgttgcagaatcacgcgtcaaaaatgcctgtttaattatctccatttggatatttcttaggcacccaaagctaacataaccaaaagaaagttttggttttctcatcattgcaaaccttatcctcccgtttcactgagtggtgctcctatccgcagggttaccaaagatagacctctgagaatcatctttgttcttctcctttactactcctcttccccagtctttcagtaagtcttgtcacttccacttgcagaatgtttttgtaatctgtcttctattctccatcttcacttttaccaccttattccaagccaccaccatcttttgcctgggctaccacaacagtatcttcagttttccctggtttccactcagatcttcctccagttcattttccatgtaacagaattggatcagggcagatcatgtcatttccctacttaaaactctccagtgactttccatggcctttacgccctgcttgagcatacctctccctcataggctgctgccttcaccatgctctagtgccatcagcctcaggacatcacctattatataccatgttcttgcccactttctctactggaacctctcctcctacttctacaggtcatatcctacctattgacatctcagcctaagtaaactcactttagatgagatgagaatatgcatttccttcttcgcttttagagcaaggtttattttatttgttgccaatatgtctcctgcaccagaatacgggcatcctaggggcatggacctagtcttgtacgtgcctggcatgtggtaggcactcattaaatacatatttatgccaggcatggtggttcacgcctataatcccaacactttgggaggctgaggcaggcggatcacctgaggtcaggagctcgagcccaggctggccaacatggtgaaaccccgtctctgttaaagatacaaagaaaaaattagctggacgtggtggtgggtgcctgtaatcccagctacttgggaggctgaggcaggagaattgcttgaacctgggaggcggaggttgcagtgagctgagatcgtgccactacactccaagcctgggcaatggagcgagactctgtctcaaaaaaacgtatatgtatatgtatatgtatttgtcctagctacctgggaggctgaggtgagattatggcttgagcccaggaggtggaggctgcagtgagatgtaatcacaccactgcactccagtctgggtgacagagcaggaccccatctcagaaaataataagtttttgttggattagcaagtagattaagttcagttctacatttaaaaccctgcaatggcttcccagtgcctagatccttatgacttctccaacccttatgaaccattcttcctctcctgggccttctctgtacctgccacagtacacgtgttgtgctagaagcacacgtctctgacatcactccccaaaccatctccaaagaagccagctcctctgctgaactaattcctccttactcttaaggtctttgtttaaagtcacttcctcaaaaccaggttaggttgtcttattacaggatcccatgctattcttatcatcaattctctaaatcaggggtcacaaactaaggcctgtgagccaaataaggtcacccccattcatttacatgttatgtatgctgtgctacagtggcagatttggccctatagagaaaaggaaaggtttgccaacccctgtgctagagcaggaactatgcgctcctcaatgtgtgtaccacaaggttcagtaactgttaatctctctttgtgttgcaggggttctgaatctggttacatatttcagttgtactcttctttagcccttaccctgtttctctaaagaaatgtggaaagaaaaggaatactttttttttttttttttttgagacggagtctcgctctgtcaccttggctggagtgcaatggcatgatctcgactcactgcaagctctgactcccacgttcaagcgattctcctgcctcagcctcctgagtagctgggattacaggcgtgcaccaccacacccggctaatttttgtatttttagtggagacagggtttcatcatgctggccaggctggtctcgagcgtctgacctgacctgaagtgatcagcctgcctcagcctcccaaagtgctggcattataggcgtgagccaccgcgcccagccgaataaataatatttttaaatgaacaaaattaactttttctgtattttaacatcttgacttcatgtaattaggttttcagggtttttttaattacaaagccttctgaattccagatttaaaaggacttaagtagactctaaatacttttatctattaaacttttaggttttgaaattccaaattggatattcacttatggatacctttggaatagtcctagtcccttgcccataaaatataggatacaagtgtaatcccagcactatgagaggctgagacgggcggatcacaaggtcaggagattgagactatcctggctaacacggtgaaaccccgtctctactaaaaatacaaaaaaaaaaaaatagctgggcgtggtggtgggcacctgtagtcccagctgcttgggaggttgaggcaggagaatggcgtgaccccaggaggcggagcttgcagtgagcccagatcatgccactgcactccagcctgggtaactgagcaagactccgtctcaaaaaaaaaaaaaaaaaaaaaaaagtgtgtgtgtgtatatatatatatatatatatatatatatatgtatgtgtgtgtgtatacatatgtatgtatatgtgtatatatgtgtgtgtatatatgtatatgtgtatatatatataaatacgtgtgtgtgtgtgtgttttatatatatatatgtatatatgatacaagacaacatggaatgtcttgtagcttaaactccaccctagacttctggggctgttctccagagcaccacgcctaaatgtttgctcatgttgcctttttccagactgttttcttaaatcctcttttattcaggcatcaccttttctcagatattccccaaccttcccattgctctcatagtccagttatataacttaacataaccctattgtgctttgtcataacgttattaacaagttttttgagatagattgtgaactccaccaagactgtgaactccaccggggtaggaagcatattttactcatttttatatacacaagtcccagcacagagcttgactctaaaaaaaaaaaacccagcaaatgttaattgaagctgcaaagtggaaggaattaacagactagatctcttttcactctggtctcctcttaattgcctactacaacttcttgttcaaagggagggactgcagagggcctcccttgtggcaatctgatcccagttccattcctcttccagcgaatgtcatggtaaccaccagcctctcccattgagccacatcttgttctgcagctgtgcttctgactagagaaacctctccctccatctccccactgcccttctagacctattccagttgcaaatttaacttacagtgtgagtatggggaaaattttaagagcataagtgctaaatacaacatccaaactacatcaggctcatcatagataccatgtattaataataatcatacacaaataaatacattagtgtctttattctagagtagttcccgcttgtcagtctcagactgcagtgctactgcagtctgcacatctagctcctgcaagttgcagcaagtcagaattgcttctggcacacctcttataactggaagtcttggtattgagctagattggaggcattccccagctatagcatagtgtgtgctttattgctaacctaggcgatgggaagaaagagaacacagctatctttccaagctgtgtgcagcatggagcaccagctgcccttgagacagaagaaagctgttgttttcatcaggtaggctgtgtgtttctctgttaagtaggctgaggggcatctggtctgcaggagctggcatttaatttgaagatgttgaggccttaaaagattgaacttgtgggtctgatagcctaattagaacaagctatgtgtgggggctgccgtactcaaatctgtttttaatggctcagttcagggctgagggggagcaatgtcaaaattaaaattagagctctagatttaattggcagaagtttaagactttcacttttggcagtgctcaagctaaatgaccttaaggatagagatcttggggtcatgggggagcatcaccctaacccctaggcttactataccgcatctctttagggtctttacagtcactcctcaactttttggactcaggacccctttatactcttaaaacttatttaggacttcaaagacattttgtttatgtgagttatatcctttgatatttaccagattcgaaattaaaactcagtgagacatttaaaaatatttattgatttattttaaagtagtaaacaataatactttttatgaataacagtagttttttgggtttttttgtttgtttgtttgttttgagacggagtctcactgtcggtgcagtagcaccatcttggctcactgcaacctctgccttccaggttcaagcaattctcctgcttcagcctcctgaatagctgggactacaggcgcctgccaccatacccagctaatttttcatttttagtggaggcagagtttcaccatgttggccaggctggtctcaaactgctgacctcaggtgatcggcctgcctcggcctggggttacaggcatgagccacagcactcggccgaataataatagtttttaaaacaaaacattttagtaagaatggactgggtgtggtggctcactcctgtaatcccagaactttggaaggtcgaggcaggtggatcacttgagctcaggagttcgaaaccagcctggctaacatggtgaaactttgtcttaaaaaataaatgaatagccgggcgtggtggctcacgcctgtagtcccagcactttgggaggccaaggcaggtggatcacttgaggtcaggagttcgagaccagcctggccaatatggccaaaccccatctctactaaaaaaaacaaaaattagctagacgtggtggcgagcgcctgtagtcccacctactcgggaggctgaggcaagagaatcgcttgaacccaggaggcggaggttgcagcgagccaggatcgtgccattgcacttcatcctgggtgagagagtaagactctgtctcaaaataagtaaattaagtaagaatgacattctttgttttttagtacaatgttttaatgtctgctctaacagaatacagctgtgttctcatatgtttttgcattcagtctgttgtgataaccacatgtcctataacctctggaaaactccactctatgctcctgagagaacagagggactggcccctggaccacgccctgaaaactattgatagatgtggtactgtcaaccatgaagagtcagacagacctcagcacttacagatgatagttttgtcaccttgaacaaatgactacatctctctgagtctgtttcctcctctgttgagagagaagtgtgctgtaactcataggacagtgtagggattaatagaatacttgttctccttgatagggacataaaatagtagggtatttgttagtgtctggcacttggtaggtgtgtaataagcattattcctcagggtactttttaaaaaattgcttaaaatacccaagagagacccatattattttgattgggttttgtgtgtgtgttgtgagtttattgtccagttctcttcctgtgcctgttctgtgtgtctattgtaatatataaaacgattttatggtccttattttcatatttctatctctaggagacattcaactccttgaaaatgaacaatccggccaggcgcggtggctcacgcctgtaaatcccagcactttgggaggccgaggcgggcagatcacctgaggtcaggagttcaagaccagcctgaccaacatggagaaaccccctctctactaaaaatgcaaaattagccagcatggtggtgcatgcctgtaatcccagctactcgggaggctgaggcaggagaatcgcttgaacccaggaggtggaggttgcggtgagccgagatcacgccattgcactccagcctgggcaacaagagcgaaactccatctcaaaaaaaaaaaagaaagaaaatgaacaattctcttcaaatccccagctcttagcagagtatatgtacattgtaggcattcagttaggtttgtggaaagaatggcatctgaaacctcaaccgaaaattgaacattccccctccctcctataccttcagttttgttttcttgagtttagttaatctcaagttcattggttatagtattgattgagctccgtaagggcaattttgaggagaattagagccacagaacttaaggcaccttcaggtagccattagccacccttctcttctctcccctcccactgccatctttaactgggaagatggcagcaatatgaaaacgtaagtagtttatttaacagacacttaacagttgctaatttgttagcagctaatttgttgctaatgtgttgcagcacacctgaagggatatagcttttctggtgcagaatcacagagtgccttgtaatgcctcttgtattgccatttatgttttcatgatttttattagtctctctattggatatgttctttatcttccagaagcttgtagtctaagtgagagaaaggtacatgggatatatcccatagaccattttactggatggggtgaggagtgatgctgagtgtgtcagcagccagctttagggttccacaatggaatcttgttgtgatgatgtgtgctgttttttaagtcctactcaaggcccatcaagctccatgttacggttcttgaagatccctactgtcgtttccaggctttggatgagtctgaaagcagggaagtagaagataaagttggggttggttggtacagaattacagaatgctaaggaaaattaggctcaggattcaaattcaaactcaggttaacccatcttgaaacaataggttctttcccctatgtcatgtaatattctcaactatcctgtaaggtaggtagcgctattaccattttccaggttaagaaagtgatattcaggcatgtccaataatttgcttaagtttatgtttagcccgtagggtatgaaaccaggatttgatttctactcttgagcccagcagtctttccatttaaccatgttgcatttattttgtaggacatggaagcctttcaagattttttgcctgcaaggggagtaaatgataaaactaggccctttttggacccaaatgctcccaaccagtactcacacaaattggctcaagttcatgaagtatttgtgtgtttaatctattgaaaagagattttgcttttgactttgctaataagtatgaatagtgtatgtaaacatatgaaagcaccttttataaagttggcacttattgtttccaagcctcctagaagcagatcacataatctcactctaccaccatatccccacttaattgtccctacattagtttctttcctcatttgcccattcctgtcttcaaatggtaagtgaggtaaaactttggggaagagagatgatacatatacaagtctggtataattgccttctttttctttttttcttttctttttttttcttttttttcgaggcagattttgctcttgttgcccaggctggagtgcagtggtgcaatctcagctcactgcaacctccacctcccggggtcaaaccattctcctgcctaagcctccagagtaactgggattacaggcacctgccaccatacccggataatttttgtatttttagtagagacggggtttcaccatgttggccaagctggtctcgaactcctgacctcaggtgatccacctgccttggcctccctaagtgctggggttataggagtgagctaccacgcctggcctaatggcttttttttttaagacagagtctcactctctcgccaggctggaatgcagtggcgcaatctgcaacctccaccttccggattcaagagattctcctgcctcagcctcctgagtagcctggcttttgccttctttttgaaagtacgtatgaggccgggtgcggtggctcacgcctgtaatcccagcaccttgggaggccaaggtgggcagatcacctgagttcagaagttcaagaccagcctggccaacgtgttgaaaccacatctcttctaagagtacaaaaattagccaggcatggtggcgcatgcctataatcccagctactcgggaggctaaggcaggagaatcacttgaacccaggaggtggaggttgcagtgaacggagattgcgccactgtactccagcctgggtgagagagtgagacgccacctcaaaaaaaaaaaaaaaaagtacatatgagagaagcaatgctgggaggaatggataatggaagagttggaaccatcagattcttcttttcttctccccaagtgggaatgttgagtgggcagagcagtggcaggttgctaaaaggctgtttgtgggaaggtttaagagccctctgtacaatcatgtgtccgtttttttatccttcactcttttctttccctagttatcttcaggcagagtgagaagctgcagcaatgtctgattttgtggaaagcgaggctgaggagtcagaggaagaatacaatgatgaaggcgaggtggtaccccgagtcaccaagaaatttgtggaagaggaggatgatggtgaggaggccccagcctcaagcttctccccactattgctaagctttggatagttggattcttgctgatgaaaagctcaggctcagcacagaagttatcacacatgaggtaccagcttgagaactttcagtcattcttagcagatactaactgagcatctgtctgtatgccaggcactaggcctggaactagaaatataaaacaataaatatccagctattgtggagtttactttagttggggggtggttgataataaatcagtagataagtctgtatataatactttctgcttttagacctagcattgttgatatttattcacctcgtttcctatttctctggccaagcccaatctttagaattgtcaacagagtagaaccacgaaatgacttcaaaggggtaaagggacgtacaagttttatcaaaggaattatggcaaaaaaaaggaatatagctgctgagtttacaaactgagtaaaacaaagttattggtggctataataatctagtaatgattttgagaagccaaagtgacggggaagatcatcctgcccaaagacagatggtgaatgtaggggaagaaaacattctttccagatgctgctactctaagtcaatggctatgttttgcatctttacatgaggcagaagagttaacatggcacccaggtcattaggtgcagagcaaatggataatcacattaatcaagtgaccctgaacctctagcctgtttttcagtctccatgcctcaaacatgcatgtcttccagatgaggaggaggaggaggagaacctagatgatcaggatgagcaaggcaacttgaaaggctttatcaatgacgatgatgatgaagatgaaggggaggaggatgagggcagtgactctggtgattcagaagatgatgttggccacaagaagagaaaacgcagtgagtagtctgtcgttggctcaagtgaggcttgggtggaggttgcagtggaaaagggcaaccccatcaccatgggcaacactttgtttcttcagcctcttttgatgaccgcctggaggatgatgattttgacctcattgaggagaatttgggtgtcaaagtcaaaagaggagtaagtgtcattctttgtcttttgtccctgggggtaaaggaaaaagccctggaaatttcaatgtctgtgggtgaggaggcacacgcaggacagtttggagaacattagagcacggtgttcggtatcattgtactacggagcctagatttgcatcccagatctgggtgcctgttagagaaagtcttgtccaagtttcaaggatgggctttgaggctacaagagcatcactcggcatgttctttcccatctctcttggtcagagtaattgtggtgggaagaagggagtgagactggagatttggtatccgtatgccagactcctcagatcctgataaggcaggttttcccacccctagcaaaagtaccggcgtgtcaaaaaaatgtcagatgacgaggacgatgacgaggaggaatatggcaaggaggaacatgaaaaagaagctattgcggaagaaatcttccaggatggggaaggggaagaagggcaggaggccatggaggcccccatggctcctccagaggaggaggaagaagatgatgaggagtcaggtatgttatattgggcagggaagccagtgtttggatgggtattgggatttcctggcccatgggaacaggatggaaaccattctttagctacatcccccagcatttgacacaaagaagttccttttcaggagcttcccttctctgttgctcactggccactcacatagtaggaaccaaagcaatttagtcctggctcagcccctgactctgagccccaacccatccttttcctacccagatattgacgacttcattgtggatgatgatggacagcctctgaaaaaacctaagtggcggaaaaagcttcctggatacacagacgcgtgagtggggtctggtacaaggtggggataaagtgattgagtgggcccagtcaggaaggaggagatcagaggcctttgccaaaaatggggcattcccagcttgcagccattttgcttccctgcctcaaataacctctaccaggcagtgatttcagactgctcccggaagccctgggagctgtctctgcactctaggactactgtgggattggagtagagtcccacatgggcaaggctccagcattcctcttccgcctacagctccatgtttattcaattatatatatattgacattcttaatatatttttgttggaagacaaatgcccgcatcacaatttacaaatttgaaagcttttgccctgagggaatactgtaatgccttagcagaagatgggtccactgagcaagacatagacccgtctgctctgttgctatttgattactgtcactcgaaggtgccaaagatgagctttttaatcttccatatacaatagtttgcccagaaatatccgccaatgaagcctttcgtccacagtgaatatggttattttgtttaccttcctcctaaccctctcagttcccttgggacaagtaaaggatctatgcaagggctgcatttctctcctctcacctgaacctgagccacctgcctcttgctgccacctacagggccctgcaagaagcccaggaaatcttcggtgtggactttgactatgatgaatttgagaaatacaatgagtatgatgaagaactggaggaagagtatgagtatgaggatgatgaggctgagggtgaaatccgagtgcgccccaagaagaccaccaagaagcgtgtgagccgtaggagcatctttgaaatgtatgagcccagtgagctagaaagcagccacctcacagatcaggacaatgaaatccgagccactgacctgcctgagaggttccaggtaaaaaaccaccagcctctgctcttctaccaatccataattaccttgtagccaagaaatattctagcaaaagtctggcattgagtatccagcacaggtttgaacctcatctcacctggggcctgggaaatccagctcttagagaagggaagatagactctaccttgcttacggttctagaaatactgttttctttagaaatctgtgaaatgcagtctgggtgctgtggctcacacctataatcccagcactttaggaggccagggtggcagattgcttgagtccaggaactcaagaccagcctgggcaacatagggagatcttgtctctacaaaaaatacaaaaaactagctggttgtgatggtgcacacctgtagtttcagccactcaggaggctgaggtgggaagattgcttgaacttgggaggtcacggctgcagtgagccatcattgcaccactgcactgcagcctagaagcagaccctgtctcaaaaaaaaaaaaccatgaaatgcttatggccaggcacggtggttcacacctgtaatcccagcactttggaaggccaaggtgggtggatcacctgaggtcaggagttcgagaccagcctggccaacattgtgaaaccccgtctttactaaaaatgtaaaaaattagctgggcggccaggcacggtgactcacgcctgtaatcctagcactttgggaggccaaggtgggtggattgcctgagctcaggagttagaggccagcctgggcaacatggtaaaaccctgtctctactaaaatacaaaaaaaaaaaaaaattagctgggcgttgacagcatgcatctgtaatcccagttacttgggaggttgaggcaggagaattccttgaacctgggaggcggaggttacagtgagctgagatcgcgccattgcactccagcctgggcaacagagcgagactccatctcaaaaaaaaaaaaatcagctgggcgtggtggcgggcacctatgatcctagctactcaggaggctgaggcaggagaatcatttgaactccggaggcggaggttgcagtgaccctagatcgcgccgttgtgttccagcctgagcaacaagagtgagacaccatctcaaaaaaaaaaaatgcttatttcatgccagaacaacactggtatggcatttgtagaacaatactggaaatgtgcacttgatgatcacacgtttctgtccaaaaaggtatgtttttcttaagtgagacacaagataaagtccgtctcaccctgttgtcttatccactccagctccgctccatcccagtcaagggggctgaagatgatgaactagaagaagaagctgactggatctacaggaatgcttttgccacaccaaccatttctctccaggtacacaaaaaagatccttaggttttgacatgaaccaaaagacacttcatcaagatggggagctcttcctcccctatttcatacatccgtgtgcctggtattagaaaactgtgtgtatgtagtcccaacaagtgtgtgtatatgagaaaaattttttagatttcatctagaaaggttatcctttgttattaagcagtcttgtatggtaagacaaaccaagtaaacattgtcttgctatttctttattttcctactgtaggaaagctgtgattacctagaccgagggcagccagccagcagcttcagtcggaaagggcccagcacaattcagaagatcaaagaggccctgggcttcatgcgaaatcagcattttgaggtaacacctcaagctctggtggcccattggtgagaaatttagttaggggatgagggaaaagataattacctaaatgaggtgggagcccccttcccgtatcccctatccatgactcaacaagtgttaggaccagcagagaccctagtgatcgtaagaacaatgctaccctgtctgcagctttattttctcctattgaggaaagcaccaggccctggaagggctgtgagggaggccaggcttctgactgttgaatttcctggagctgtttctccaggaagtcattatctactgacagaggggatcttagcaaatctgtcttctctgagtgactgcagtctctttgccatcctaggtgccttttattgccttctatcgaaaggagtatgtggagcctgagttgcacatcaatgacctatggagagtctggcagtgggatgaaaaggtaatgtagatccgtggcccccaagaggtgtgggccagggaaggcaccattactaccaggataccacaaacccaaaccccccaggcctgtctagtcctcccccactaggtttctggtaaggatcagagcagccttgagtctccagggctgaacacaagctctcattcctgccctacttcaccttagtggacccagctgcggatccgtaaagagaacctaacacggctgtttgagaagatgcaggcttatcagtatgaacagatctctgctgaccctgacaaacctcttgctgatggcatccgggctctggacaccactgacatggagaggtaaaacatgcggtgtttattccattatgggaagccctcagaccccaaggctggccctgcaggagcactgttaaaccttggagaatgtgtagcacagggccccatcccttagaaatccaacttgtcaaccaggcacagtggctcatgcctgtaatcccagcaatttgggaggccgaggcgggcagatcacttgaggtcaggagttcaagatcagcttggccagcatggtgaaaccccatctctactaaaaatacaaaaaattagctgggagcagtggcacacgcctgtaatcccagctactcaggaggctgaggcaggagaattgcttgaacctgggaggcggaggttgccgtgagctgagatcgtgccactgctctccagcctgggcaacagagcgagacttcgtctcaaaaaaaaaaaagaattatagcttgtcaaagccaggcgtggtggcttctgcctgtagtcccagttacttgggaggatgaggcaagagtatcacttcagcccaggaattcaaggttgcagtgagctatgattatgccactatactccacactgagtgaaagagcaagatccggtttttttttgtatttttagtagagacagggtttcagtgtgttagccaggatggtcttgatctcctgacctcgtgatctgcccgcctcggcctcccaaagtgctgggattacaggcatgagccactgcgcccggccgatcctgtctcataagaaaaagggggctggggcctggcacggtggctaacgcttgtaatcctggcactttgggaagccagggcgggcgggtcatgaggtcaggagttcgagaccagcctggccaacacagtgaaaccctgtctttactgaaaatacaaaaattagctgggcgtggggacaggcgcctgtaattccagctactcgggaggctgaggcaggagaattgcttgaatctaggatgcagaggttgcagcgagccgagatcgtgccactgcactccaggcctgggcgacagagctagactccatctcaaaaaaaaaaaaaaagaaagaaagaaaaaggaggccaggcgcagtgcctcatgcctgtaatcccaacactttggaagactgaggtgggcagatcacctgaggtcaggagttcaagaccagcttggccaacatggtgaaaccccgtctctactaaaaatacaaaaaattagctcggtgtggtggcaggcacctgtaatcccagctactcaggaggctgagacaggagaatcgcttgaacctgggaggtggaggttgcaatgagccgagatcgtgccattgcactccagcctgggtgatgagcaaaactccatctcaaaagaagagaggctgggcgtggtggctcacacctgtaatcccagcactttgggaggctgaggtgggcagatcacctgacgtcaggagtttgagaccagactggccaacatggtgaaaccctgtctctactaaaaatacaaaaattagtcgggtgtggtggtgcgtgcctgtgatcccagctcgcgaggctgaggcaggagaatctcttaaacccaggaggtggaggttgcagtgagccgaaatcacgccattacactccagcctgggtgacaagagcaagactccatctcaaaaaaataaataaatacgatatgttctagggctatcatgtgtcttggttttgtttttgtttttgtttttgttttgagaggagtctcactctgtcgcccaggttggagcgcagtggcacgatcttggctcactgcaagctccacctcccaggttcataccatctgcctcagcctcccaagtagctgggactacaggcacctgccactataccctgctagttttttgtatttttagtagagacggggtttcaccgtgttagccaggatggtctctatctcctgacgtcgcgatccctccgccttggccttccaaagtgctgggattacaggcatgagccactgcaccagctatgtgtctttaaaaaagaaaaaaagaaatggtctttcttctgttgcctaggatggagagcagtggtgtggtcacagttcgcggcagcctcaaccgcccgggttcaagtgatcatcccatctccagtctgggcaacagagtgagaccctgtctcagaaaaataataacaatagtaataataattggaaaaaactggttgggatcccattttagttgggatactgccttttgggaattggacctcttgtagccaaattgggatataccctttctgcagtgatgactgaaaccttatgtctcttctttttcaggctcaaggatgtccaatcaatggatgagctgaaagatgtctacaaccattttcttctttattatggccgagacatccctaagatgcagaacgccgccaaagctagccgcaagaagctgaagcgtgtcagggaagagggagatgaagaaggttagtgctggaaaagaaaatccaggagatttgatggccatgcatgatggctcacgcatgtaatcccagcattttcagatgctaaggtgggtggatcacctgaggtcaggagttcgagaccagcctggccaacatggcaaaaccccatctctactaaaaatacaaaagtagccagggtaggtggcacatgccggtaatcccaactgctcaggaggctgaggcatgcctgaacctagaggcagttgttgcagtgagttgagatcatgccactgcacaccagcctgggcaacaaaccgaggctgtgtctcaaaaaaaaaaaaaaaaaatcaagaaagaaaacccaggagacttgacagcccatggcatcttgaaggaggcccttggctgggtaccctttgaggcttctctcctaatgtgtcagatccttgggagtgattggaaactagaaccctaaatctccccatgttttcttcccaggtgaaggtgacgaggcagaagatgaggagcagagggggcctgagctcaagcaagcctctcgccgagacatgtacaccatctgccagagtgctgggctaggtaaaagctagctgctttgggatttaggcattctagcctgagcaaggggagttacccagaaaaaagactggtaggtaggaaaaagaaaggctatctgggtcaatcaccaatccaatcctgaactagcctattagctggtctttaaaaatactccctctccaaacccattcccgcccgacatgatggttcagcctctccctaatttcctgagataatgggaaactcatgattggagggagagagtccagtctgtctgtttcttctgccttataacagcccatcaagtgtttaaaatcagttttttcattgttctttgactacctggtcctgctcatttatggcctctttaaattccagtgctctagctgggcacagtggctcacgcatgtaatcccagcacttcggaggtcaaggtgggaggatcacttgagcccaggatttggaggccagcctggtcaacgtagcaaaactacaaaaaatacagaaaaaattagccaggagtggtgggacacacctgtagtcccagctactcgggaaagctgaagtgggaggatcacctgagcccaggtggttaaggcttcaatgagccatgatcacaccactgcactttagcctgggcaacagagcgagaccgtctcaggaaaataaaaaaggctagttcccagaattccaactccagattctgaaagccaagaggtttatcagcctatctgctgccttacccttcactcttctgtttgctttagatggcctggccaaaaagtttgggcttactcccgagcagtttggggagaacctgcgggatagctaccagcggcacgagacagagcagtttcccgcggagcccttggagctggccaaggattacgtttgcaggtaggcatgcagcaggtggctgacaggaggaggggcctgaggaccacaacaccctggtcctgtagctgcaccattttccccacagccagttccctactccagaagctgtgctagaaggcgcccgctacatggtagccctgcagattgcccgtgagccccttgtccggcaggtgctgaggcaaaccttccaagagagagccaagttaaatataacccccaccaagaaaggtagaaaggtgagctgggtgaagggctttgatccaagatgtgcaccagctctttctttgattgcctgagtttcttgccttccacttcactgagctgtgtgtctgaaagcagaaaggctgtcttttctcctggggcctggcccagcccatccgcaggctcatgattcccccttcatgtgtgcaggatgtggatgaggcccactatgcctattccttcaagtatttaaagaacaagcctgttaaggaactgagagatgaccagtttctcaagatatgcctggctgaagacgaagggctcctcaccactgacatcagcatagatttgaagggagtggaagggtaagcagagccctgggctggcgactctctggggaaggcctgatgaggagtctggtggagggaagggcccctcaggagtggggaaccacaatttcagagttgagcaggctgttgtctctggcttgcttagaatgttcatggacattgggtgtcaccttttctccattcctgacaccatagctttgtgtctcttctcagctatggcaacgaccagacatattttgaggagataaaacagttttactaccgagatgagttcagccaccaggtgcaggagtggaaccggcagcgcaccatggccatcgaacgggctttacagcagttcctctatgtgcagatggccaaagaactcaagaacaagctgctggctgaagccaaggaatatgtcataaaggtgaggacagagactcatgattttttttttttttttggtgacagagtcttgctctgttgcccaggctggagtgcagtggcgcaatcttggctcactgcaagctctgcctcctaggttgatgccattctcctgcctcagcctcccgagtacctgggactacaggcgcccaccaccatgcccagctaattttttatatttttagtataaaatatgttatatttttagtataaaataacatggttttaccgtgttagccaggatggtctcaatctcctgaactcatgatctgcccaccttggcctcccaaaatgctgggattacaggcgtgagccaccacgcccagccgagactcatgatttttagtcatatgatttccccaaactatagttgggcatgaaggaaccccttaggaatagtcccatagctaatggagaaacacggggggcaggtgaagcataatctgagagggaatgctaacaaggccacagggaccacctctaagacctctctgctccaggagcttctcccctcccccagccccactcatccaaacattctttgtttatatcactgttctctgtatacactcctgtttccacaagcaagatatgccttcaggtggtaagcctgccaatggctaggaacatctgcacataagagtacacaccctcgcacatgtgtgtatgagtgtgtttccatagcactcttggtgagcctgatgaccataatgtcatcatgtatgtaatacctgttgtgtctcttccctcaggcctgtagtcgaaagctctacaattggttgagagtggcaccctaccgaccagatcagcaggtggaagaagatgacgactttatggacgagaaccaagggaagggcattcgagtcctcggcattgctttctcctctgccaggtaacagcctatttttgcctccccagcaccatctcttgtcttcctaatttcatttttctctcattcataacttcatattgctgattattgcattcttgtttttctgtctgtctggcagagatcaccctgtgttctgcgccctggtcaatggtgaaggagaagtgacagacttccttcgactgccccattttaccaaacggcgaactgcatggagagaggaagagcgggaaaagaaggcaagtggctaggacgaggatactaagtgtacatctggagtatgtcttatgattcagtggagataagtgtttacggtctaagcaacatcctatgcaagactgattgtgtctgatctggtcactgacttgtcccctgggatgcctcacttccatgagcagtagatggcactcaagttatctagtacgggatttgcttctggcttgaggccagttcctaggccttgtgtgcttctggagttgctttaactgcctcttttcttaccagcatctgggtcaggctgttccagcagctgaaagctactgaggcatgaagccagccttttccctgctttagcctttcagggtgtcttttttccagggaaagaagactttcaattcatttggttggtatatttctgaattttgtttatcctaatggtatctgtagtatctttcagttttgttaacagagccccattcttgaaagaaaaacttcttaagaaacaactattttttaaattttattattatcattattattattattattattattattattattattgaaacagagtcttgctccatctccaggctggagcgcagtggcaagaactcacctcactgcaacctctgcttcccaggctcaagtgatcctcctgccttccaagtagctgggaccagaggcgtgcaccaccacgcctgtctaatttttgtattttttgtagagacacggtttcaccgtgttgcctaggcaggtgtcaaactcctagactcaagtgatccatctgcctcagcctcccaaagtgctgggattacaggtgtgagccactgcacccagcccttaaaatcttgaaatggagatcagaatatctaatagtcctaactactcacattttagcaaaagtcacaccacaaatgaaatagccacaaaaggaggacatgcaggagtgtgaggcagtggaaagtaaatcataagaaactggacatctttaagatgaaggaaatcatacttaaccatgttgaccttttcaaagggccctcacccaaaagagggcagctactagttctttgttttgcttcatcaaaactagaaccaatggctaagtattagattttggtttacaataaaaaagaacggtttcctaacttcatccttgggacctagccagtggcacctggtaccactggagcgcagttctagtcagtggaattattaagcagaggcagggttggccaactttcaggaagaggtgggaatagttccttggtagcaccttggaccagatatcttctgaagacttccagttcttacaagatctccaacatagggagacagaatttcctgaaatctttacatcctcagagccattcagcttcaattttctttcaatccaggctcaagacattgaaacgctaaagaaatttctcctgaataagaagcctcatgtagtgacagttgcaggagagaacaggtaggtagggattagaccacacctggtttaaggccgtgacccaactcatcccttattattgagtctggcatatgcccataacagatggggcttgtgcttgtgcagggagtgtccctggggatgtttgacctcattttcttcaaagccctttcctcccctacctcttcacccccaaggcagtcatgagactgtccatccctaagaaaacatattcattgaccaacactcatcccaccagggacgcccagatgttgattgaagatgtgaagcgcattgtacatgagctggaccagggccagcagctgtcatctattggggtagagctggttgacaacgagttggccattctctatatgaacagcaagaagtcagaggtaatgctggagcctcacccttagggcctgcccaggcaagtgctattaatcccaaagagattaaattgggaaacaaaagttatcaggggcacaggactgtacctgtgtacttatccatgcagaagttctccgttttgcagttacggttcagattgggagtcccagaaattaaatcggtctcaggaaaaaagatcccagagaagcagagaaaatgatttaaaccagaatggtttggatttcctcttgatgttgtagctaaggggattttaaggccctgctgaccctcgtttgactctaggcagagttccgggattatcctccagtgctgagacaggccgtctccctggcccggcgcatccaggaccctctgattgaatttgcccaggtgtgcagttccgatgaagacatcctgtgtctcaagtttcaccccttgcaggtgagtaggatttgacaggcaggctcgggtgaagggaaaggcagagtaaccttactcctgcctgctgaatgtccacaggagcatgtggtgaaagaggagctgctcaacgccttgtactgtgaatttatcaaccgagtcaatgaggtcggggtcgatgtcaaccgtgccattgcccacccttacagccaggccttgatccagtatgtttgtggcctgggacctcggaaagggacccacctcctgaaggtaggattggagtgaattcagaaattttaaaacttgccatttcattgaatatgaatatatactttgtcagtataatttgacagattgggaggaccaaggtcagtgacttgtccaaaatcactcagctagtgagagtcaaaagagtctgacttcagacccagttggccaaagctgtgcccttcactgctgcttgcaccaccacacccagctaattttttgtatttttagtagagacggggtttcaccatgttggccagactggtctcaaactcctgaccccaggtgatccacccgcctcagcctcccaaagtgctgggattacaggcatgagccactgcgcccggccaactagtgttaacttgtaacttataagccatacattagttgtatatggtctttggtgtaggtataacatcatttatttgtttattattttcccatttaaagcaaaacttttttttttttttttttaattttgagtggtcgatagcatgctgtagtgctcaactagatactgggtgggacagagtttttgttatgagggtttaatagagactggaacagtctggggaggtggggcctgcttactgccctggctcagtccagctctctcccccagatcctgaagcagaacaacacccggctcgagagccggacccagctggtcaccatgtgccacatgggtcccaaagtcttcatgaattgtgctggcttcctcaagatcgacacggcctccctgggggacaggtgatgccctctgcctggatggggcaggaggaattcccttgtgggctttgttttcgggtttcaggggttagggctatcaaagggccacaagccattttaacttaggaaatgttttaaagaaaaggtaaggaactttattcagtcaagagcccctgacctatggaaaagatcggttcaatcatgtgaaacatttttcgtgtgagagaaacataaaaagtaccagcttagcttataaattaagcatggaaaacacaagattttgttcagtaaacacaaacttgcttttttattattatggtttgttgtggccagataagggtgggaatagcgggggcaatgaaaaaggagtttgggggtataaagagataaggaagggggagagagatttggtatgttttgagatgatgttattaagagaaagttctattcacttggactttggacttcactattgacctcttcctctccagaagttatcaactcagtctttggaggatcttttccacgggcacatagctcctcattcagtaatggaaatcagtggggaaataggcttcaagttctaaaacttcattttccactcagctttgctgtaacactccacgaataacataggtccatgtgagtgcacgggcaagaccagcctgggaaggctttatgggggaaaatagctatcagcaaattttcaaaggtttttttcccctttcttgatttatcttattatgagactcatataagttcatcatataaaattcaacatatagaaatattatgcagaaagtggaagtcccccataatcccaccccccagagataactaccataacaattttatgtatactacagtttttctaaattttatttttgctatgcatttactaactacccatttactacaaaaatgggatcatatggttcatagtgtttttgcagtgcatttttcacgtatcaatatattgtggccatctttccatgtcagcacacatagatctacctcattcttgttaatggctgtatagtattccattgtatggaggtgccctaatttatttaaccagttccccattggtggacatttgggttgttactagaagcttatcgttctatatcctgttccttttctgcctttcctccagcactgactcatatattgaagtccttgatggttcccgtgtccaccctgagacttatgagtgggctaggaagatggcagtggatgccctggaatacgatgaatcagccgaggatgccaatcctgcaggagcccttgaagaaatcttggaaaacccagagcgactgaaagacctggaccttgatgcctttgcagaagagctggagaggcaggtaagggacagcatggaaggcccggcaggagaacccatcccaagtggccaggttggtaggagacttgggcagtgagtgtgcagagaaagcctgatactgttagtatggcagacttgatcctcatctccctgccctgctctactgggctcctcaaggaagtttttggtctgcttgttaaggagccagggaagtctcagagattgccaccataattacaaggggcaggagggagttgggaggatgtcagtactacagtttccgtctaggccccctttcctcctttctaacagcacagctttgcatttatctgtggactcattggggttccataaagcattttgattacagtgtttcatggctaagtttgaaaaccacctttagtaaatgttgatggaaagaaaagaagaagccctgacagaaacttactcccatctggagaggcccgccccttccacgggactccttgaggctcaggttggggggcagctgcaaggctcttcttgatgggcttcttccccagggctatggtgacaaacacatcacactctatgacatccgggcagagctgagctgtcgatataaggacctccggacagcctaccgctctcccaacacagaggagatcttcaatatgttaaccaaagaaacaccagagaccttctacattggtaaattctggggtcatttttttattgggggcaggaggtgtgtttactgtgtacattcaaaccaagcagcagttccaacagattgaggcaggtttgtgttgtacatggggaaggccaggagagcattttaaaagactaaagagtcctggactggaaatcaaaactgaatttaaggtcaaatgtgcttccagtgtgctatggaatcttcatgcagttagtcttcttataggctttattttcccctatcatcaaatcaggggaacggccaggcacagtggctcatgcctgtaatcccagcactttgggaggccagggcaggcagactgcttgaggccaggagttcgagaccagtctgggcaacatggtgaaaccccatctccactaaaaataaaaaattagctgagcgtggtggtgggcacctgtaatcccagctactcgggaggctgaggcaggaggattccttgaacctgggaggcagaggttacagtcagccaagatagcaccactgcactgcagcctgggcaacagagcaagacttcatctcaaaaataaataaataaataaaaatcgggaagagttccctcttcaaggatgggaaggaagtcagatattctgtcactgaaaggctggtggaaagaagtgctctccacattctctgagcctgctccccatcctcttttccttcttgcaggaaagctcatcatctgcaatgtcactggcattgcccacaggcgtccccagggtgagagctatgaccaggcgatccgcaatgatgagacagggctgtggcagtgccccttctgtcagcaggacaatttccctgaactaagcgaggtgtgtgctgcagcattatcctgctcagtggatttccttggttgaatgatctcggtgcctagaagggaatcagaaatgagggtgttctagatcattctctcaccaaacaagtacacaaagaaggaagacggacgggaaacacacaggtttagcatgaagtcccttctgagaaggctgacatagctgggcacggtggctcacgcctataatcctagcactttgggggccaaggtgggcggttcatctgagatcaggggttcgagaccagcctggccaagatggtgaacccccgtctctactaaaaatacaaaaattagccagttgtggtggcatacgcctgtaatcctagctactcgagaggctgaggcaggagaatgacttgaaccgaggaggcggagtttgcagtgagccgagatcataccactgcactgcagcctgggtgacagaatgagacttcatctcagaaaaggaaaaaaaaaggctgacttagaaacttcttatggtcggccgggcgcagtagctcacgcctgtaatcccagcactttgggaggccgaggcgggcggatcatgaggtcaggagatcgagaccatcctggctaacacggtgaaaccccgtctctactaaaaatacaaaaaattagccaggcacggtggcggccacctgtagtcccagccactcaggaggctgagacaggagaatggcgtgaacccaggagatggagcttgcagtgagccaagatagcagcattgcactccagcctgggcgaaagagcgagactccgtctcaaaaaaaaaaaaaaagaaacttcttatggtcgctgggtcaaaacaaaatggcagacaggcatggtggcacgtacgtatagtgccagctacatcagaggctaatttgggaggatttcttgagcccaggagttcgaggccagcctgggcaacatagcaagaccccatctccttttttaaaaaaagggaggggctggccgggcgcggtggctcactcctgtaatcccagcactttgggaggctgaggcgggcggatcatgaggtcaggagatcgagaccatcctggctaacacggtgaaaccctgtctctactaaacaatacaaaaaattagccaggcatggtggtgggcgcctgtagtcccagctactcgggaggctgaggcaggagaatggtgtgaacccgggaggcggagcctgcagtgagccgagattgcaccactgtactccagcctgggcgacagcgagactctgtctcaaaaaaaaaaaaaaagtggggaggggccaggccgggcacagtggctcatgcctgtaatcccagtactttgggaggctgaggcagttggatcacctgaggtcaggagttccagaccagcctgaccaacatgatgaaaccccatctctactaaaaatataaggattagcagggtgtggtggtgagactcctatctcaaaaaaaaacacaaaagggaggggcctcagttgcagctaaagggatctaagttggataaacataaaagaggatggggcacagtcacaccagtaatcccagcactttcaggggccgaggcaggtggagtgcttgcccaggagttcaagaccaacctgagcaacatggcaaaaccctatctctacaaaataaaattagccaggcttaaccgggtgcagtggctcacgcctataatcccagcactttgggaggccaaggtaggtggatcacgaggtcaggagatcgaggccatcctggctaacacagtgaaaccccatctctactaaaaatacaaaaaattagctgggcatggtggcgggcgcttgtagtcccagctactcgggaggcagaggcaggagaatggcgtgaacccgggaggcagagcttgcagtgagccaagattgtgccactgcactccagcctgggcaacagagcaagactctgtctcaaaaaaaaaaaaaaaaaagattacccagacttgggggcgtgcgcttatagtcccagctactcgagaggccaaggtggaaggatcactcgagcctgggaggttgaggctgcagtgaaccctgattgcaccactacacttcagcctaggcaaaagagtgatactgtcataagaaaaagatggctaggtgtggtggctcacgcctgtaatcccagcactttgggaggccgaggtgggcagaacacctgaggtcaggagtttgagaccagcctggccaacatgatgaaaccccatctctactaaaaatacaaaaatccgccctgtgtggtgatgcacgcctgtaatcccacctactcaggaggctgaggcacgagaatcggcttgaacccaggaggcggaggttgcagtgagccaagattgcgccactgcactccagcctgggcaacagagcaagactccatctcaaaaaaaagaaaaagattcatctgatggccagtggtgccaagcatcagctatgagacaagggactttgtagatggtcaaattctgtcttggcagatgactaagtcattgtgttttcagatcatggtgcaaggtgtcaatggtaaaagaaattacaacacctctgggagctcttttctgaatgagcgatctccagaatattgataatcaagctcttctcctcatgccctcttcaggtgtggaaccactttgacagcggttcgtgcccaggccaggccatcggtgtcaaaacacggctagacaatggtgtcaccggcttcatccccaccaaattcctcagtgacaaagtggtaaagcggccagaagaacgagtgaaggtagaggactgattgtcctaaggtcgtagtgcaattttcagctgcccagatcaggtctctttaactttgggctgtccccaccagaagttaggctctgttcccagtggctgctggtgggaagtgtttcagggaagatttataactagttgaaagaagctagggtgagaagcatttgaatgagtagcagcttttgttcactgcctttgtgaaatttcagcaagttcccagtcctttgggagagggctcttcctgtgtgggaagctgcagttcagtccagagggcagggcccagcattacatgctgtgaaacagaaaggctctgcctgttctcccaagaccaggcatcagcgctttagagggtgggaaataatgcatggcacagcccctgtgcacagggagcctctggatcctctaggcaggaccagatgacacagaaggaaccttgagatggtgtctgtggatagggaggaaatctctaggctccatttctgttctgttattttctggccatatatcatgcacccactagataccagcactgacatcgacatatgttgtctctaatctcacatgctgatggaaatggaaatattgtcttttgtcagagaaattcaacttttttcagaatcacccagttagtgatatagctgatagcagctctgcgaaattcactggttctgagtgttgtgaacctctgagaactatgacttaggagggctggggaaaaatagttctaataagtgaagctggggagatttttcacaaggagaagagtgatgcagagtgactggcttttgccactacttagacagaagggctcatatcaagggtaagatacagaaaacagctattattttgcttccccttcaaaaagggaagtcaggccaggcatggcagctcacacctgtaatcccagcactttgggaggccaaggtgggtgaagtcattacttgaagtcaggagttcgagaccagcctggccaacatggtgaaaccccgtctctacagaaaatacaaaaattagccgggcatggtggcacacgcctgtaatcccagctgctcgggaggctaagacaggagaatcgcttgaaccctgtgggtggaggttgcagtgagccaagatcacaccactgcactctagtctgggcgacgagtgagactgtctcaaaaaaaaaggagggggggtgttgggggagtcaacctttgatggcaccttgggagcagtaactaggcaacttcatgggagaagagaagagtgccagggacagggtagatccagcaggcttcagctggttttcctgcccagagtggaggcattagtgcagggcttggcctgtagtctacagacaagattccaccccaaactcccagtctgccattcagcagctggctggctttgggcaagtcactttacaccttacacctttctgcctggactttggttttctcatgggtgaaatagggcatcgggctagatcatctttgtcccttccagctcaaatgttctgtggatctaggtgggaatgactgttcactgccgcatcatgaagattgacattgagaagttcagtgcagacctgacctgccgcacctcagacctcatggacaggaacaatgagtggaagctgcccaaagacacctactatgactttgatgctgaagctgcagaccacaagcaggaggaggacatgaagcggaagcagcagcggaccagtgagtgtgcctcccaccatctctgtgcaccctgcatcttggcagttctcccagtgcaggattcaggccacaggatgcacatgtgtcagtctcccagtggaagtggggactcagctttgaggtgctaaggcctggagatgtcatgaaaaagtcataggtagggctggaacccagagtctcttgggtcacattttctttgctaatgccttgtgactcttaaagcctcattctttcagtgtcctaggagcccaggtgaacatgtccttcatatcagctaatccaagcccagagaaggtgaaagagtctcagaatcccatagtgggtcagaaattaagcccaaacagggtggctcacggctgtagccctgcactttgggaggccaaggcaggaggagcacttgagcccaggagttcaagaccagcctgggcaacttagtaagacaccatctctacaaaaaaaattttttaaatagccaggagccaggtgcggtggctcatgcctataatcccagcacttcggaggctgaggcaggtggatcacttgaggtcaggagttcaagaccagcctggtcaaaatggtgaacccccgtctctaccaaacgtacaaaaactacccaggtgtggtggtgggcgcctgtaatcccagctactgaggcaggagaattgcttgaacccaggagtgagaagttgcagtgagccaaaattgcaccactacagtacaacgtgggtgacagagtgagactctgtctcaaaaaaaaaaaaaaaaatggccaggcgcgatggctcacgcctgtaatcctagcactttgggaggctgaggcaggcgggtcgcttgaggtgaggagttcaagacgagcctggccaaaatggtgaaaccccatctctactaaaaatacaaaaactagccaggcgtggtggtgggcgcctgtaatcccagctactgaggcaggagaattgcttgaacctaggagggagaagttgcagtgagccagaattgcgccactgcactacaacgtgggtgacaaaatgagactgtctcaaaaaaaaaaaaaaaaaaagccaggcatggtgatgtgcaccggtgtattcccagctattttagaggctgagacaggaggatcgcttgagcccaggagttcgaggctacagtgagtcatgatttgccactggcactccagcccagatgacagagcaccccaactcaataaataaataagaaatgaaggcctggtttgtcctgttgctgccagctcctagccccatcacccagtctgtactgcttttctgcccttttcagcatacatcaagagagtgatcgcacacccatccttccataatatcaatttcaagcaagcagaaaagatgatggagaccatggaccagggtgatgtgattatccgaccaagcagcaagggcgagaaccacctgacagtgacctggaaagtcagtgatggcatctaccagcatgtggatgtgcgggaggagggcaaggaaaatgccttcagcctgggagccactctgtggatcaacagtgaggtgagagccagtgcctgcccacctcccatcccactcctgcttccagaaaggtgcccttcagggtgctttcacctgacattagtaactcgggtcataggtattttagctgtgcacagcaacaaaacgggaggtggtttgcggaatgagtcatttgatatcaattttattttgtcccctccttccgtgtcctccaaatgttaaaatagtctacctagagagagccaatggaggaagaggagaaaatacacatatatacgcacacacatatatcaagtttctcttttctgttttcagtgaagagaaatctggtgaattttcctgttgttcccaagcactaggggagaatcaaagccaggatttaaaggactttatgccctgtgagctaatatatctggacatgacacagatggataaactgaggggactttgctatggactgagaagcccatcccctcccatggtttttcttctggatggatttgatcaagaatctcagctctggatatgacacatggggcctttaccttcttcccacaggaattcgaagatttggatgagattgttgctcgctatgtccagcccatggcatcctttgcccgggaccttctgaatcacaagtattatcaggactgcagcggtggggaccgcaaggtaagcccagggccctctgaggaatgacacttgccaatcacttaaggatgtacgctttcccttcagtataggggacactcaggcggtgaaggaagtgtacatcatgtgtgcaccagacgttgtgtaccaagcatgctgctatcccaacctctccccctcattctacccccagaaattagaggagctgctcatcaaaactaagaaggagaagcccaccttcatcccttatttcatctgtgcctgcaaggaactgcccggcaagttcctactgggataccagccccggggtaaacccaggtgagcactagtgctgagaaggtgctgccactggggttcataggcaggctagaaggcagggagaggcccggagcagtgccctctctggctctgctggactgcctttctcctctcatctgtttagaacagaggtggaggttggaggtgggaaaagagggtgatgatttcaaggcaaaaaggcaaggattcacataagaagggcgctttccttaacaccgtgagaaaggagttcccttcacctcctctccctcccacagagtgacaggagtcaccagacactcttcacctgattgcagaaactgggggccagtacactggtctctcctgtccaccacctgcctcaccctcaccagggcttgcacacagtggctcactgttgctgtaatgtgctcactccgcccgcactgaagcggtggtcaggagagcctgtctcctgttctgctctgtctcctgctctgcctgctgctctgcctgcttctgtgtgactaacaggctggccttcctgaggtattcctttatctgagtccctctagcgcttaccctgaacctagaggacaaagtccagtttccttagactggcgtctttgtgtctgtgatacagactggtaatcacacttgcttctctgcctaagccctgcccccatccttccattggcctttggccatgtgcacttctgcttttatccctgtactggctttacctgatgcacagctcaggctgcattagtaggggctcagtggccagatgacaggaagccctagactctgtaccgtgtgccatcttgggcacatctggaatattgtgctcatttcttgagaagcctgttgactcaccagtgtgcttccagaggccagcagccagggctaagtggggctggaaactgtgtcctgtgtggaacagttgagcaaactggtggcgggggtgggggctctaaccaggaccaggtgcagcatgatagcttctggggaaaggagctgactctccttgtgtggcagaattaacacttacggaagagttaggaggcaggtgtcagcctaatagaaatgagaactgtgtactatgtagcattatctggttgccattgatagctggccttcattgagcacaacccagctttaggcattgtggaacgtgctctgtgcattctcatttatcctcacacccaccccataggcttcagtgctgtggtcctcactggacaaatgaagcagagattcaagtttggtaacttggtgcagcgtgtcatatgtggtgaatggcagagctaaaactagaactagaactggaactaacccagagcccctcttaacaactatctgctactctcagaagtgttgaacaagggcagactaccaccttccacagccactgcagaaagatgcctgctttaggggagttgcgatttgctgctctgggaggccccttccaaccctggcactatgggatctcggtctcacttcaccggcagtatcctgccttcatactgcagcccagtatggtagcacagcctccagcaagccttcctccggcagtccgtatgcagcacacagagggccactgactccttggtcttcaatatgttctgccatgtgctgctcacctcccttcacaggcctggggactggctgtgtcatctctcctttcccctagcacccagaatggctacttcacatggtgggcatctgttctggtcgctcttgtggtgggtcccaagtggtttctgatgcatgtttccttctaaaatcctaggatagaatatgtaacggtgactccagagggattccggtaccggggccagatcttcccaaccgtgaatggactgtttagatggtttaaggatcactaccaggatcctgtaccaggtgagttctgctcttcctgacttcagggacgtggctggaggaacacctaggacctgactcagagtagtcccagcctaggggaccaggtgaggagtaggctgtcactgcagctgtcttactcctcctgcagcctcccagcaccaggaaggttctccatccactgtgcctatgcagcttcccttcctccctctacctacttcagtgccccttccaccccctgaattgggaaaccaaaaataggtttctggagggatgtaactaaataatcacttcctgcaggcatcacccctagcagcagcagcaggacccggacacctgcctctatcaatgctaccccagccaacatcaaccttgcaggtgaggagcttgagcctgggactggaggtgggaaggatggagctaaagggactttcacctctaacatgcccctccccacctctgtgtgcttacagatctgacacgggctgtgaatgccctgcctcagaacatgacttcacagatgttcagtgccattgctgcggtgacaggccaaggacagaaccctaatgccaccccagcccagtgggcctccagccagtacggctatggcggcagtggaggcggcagcagtgcttaccacgtatgtggcttggggaggaagctccctgtgcagggtggggcccatagactgccctctcgcattgcccacaaggggcttcacatgcacagatggggctgccacggccttggtaactgtctccaacagatatttcttgtccttaggcccatttgaaggggaagagggtaagagagggcataacctttccacgggcctttgggatctttggaacccgcaagccaccagaaagttgacatggtcaggaccagtgggcaccactgtgtgctcggtgctgacctgcaggcttcccactgctggtcagaagcacatactcagtggaagatcatctggaaagctttgctgagcccacccttgcgcttacccagaattcacagcaaggccaaacaagccccacacccatccctatttaactgttcatgcctctccaggtattcccaacgccagcccagcagccagtggccacaccactaatgacccctagctactcctacacgaccccaagccagcccatcaccacccctcagtaccaccagctccaggccagcaccaccccacagtcggcccaggcccagccccagccctcttccagctcccggcaacggcagcagcagccaaagtaagtatctggatggtggcacagtgcaggtcagtggtaggggcaggtgttgtcaagaggccgaaaggcttagcagaggcaggtgctctggatcctctgagggccctgaccacatgatatgccaggaacactagtttctgggtgaagacggaagagggcagtatggcagccagctgctgctgtatctgccttatcccagtagaggggctgctgcccataggtatgaggttcctttctgcaagggtacagtgattggtgggaagacttccttctagcaaagtcccaatctcaacttttcttcccctcccaggtccaacagccatgcagccatcgactggggaaaaatggcggagcagtggctgcaggaaaaggaggcagaacggcggaaacagaagcagcggctgacacctcggccctcccccagccccatgatcgaaagcacccccatgtccattgctggcgatgccaccccactcctggacgagatggatcggtagggggcctgctcctcggactctggttacctctgaggctgggaaaggcctggctgcccactgcctccctccctgcccctccttttatgtccataaagtggcgtgaagtgagacgttctctttggtggtcaacccggatgggtgacaggctggatggccttgtgaacttgagctcagtgtatgctaggcaacaattctcccgctccagaccctcaccgaccacctgtcctgggaccaggctgggaggggagtgtggcagggaggaggaagaggaaggtgagaatgagtagaacagttttgtattctactccctacaagccattttgaacttctgccctcaccggactctgggctgtgactggggcaccaaactcagcacatgagtctcccctagctctcgtggggagagggatgctatttattcagtttggggcaggagggagaggagggaaagtatttctgaccctgatgccaacagccgggtggctgtccaagcaggattgcaggggacacagggaagcactgcccagcccctgcctggctgccctttcccccctgctgctgccaccgcttcctgcctgtcatttgaataaacagtgtttctattgagctcttgccaaagcctctctctccaactctccagctctttgaggggtggctttcaaagcagtgtttggagctccaaggactcccctgactccctcttctgatccatcagaggcaaagattcatagactagaggcagcttctacatcagactgcctggggcacatccctgctctacttcccagccgggtgaccctgtgccagttcctgctgcctttcagctggctttcttacctgtaacatggagatagtgatacctgcctcatcagctgctgtgaggaccaaggcagcgtgtgcaagctccttggcccaacgcctggtacgtcgcaaatgttacccggtattattacacccactcactcacccacagcacagctgccccatccgcccatgcctgctggtcttctctggcaccctggagaaaggccacaagtaaatctggatttctcaacttgagcctctgccgttcatctcttcccttttcccagctgggccttggtctcttgcaagctctcagcagtaaggtgttcctgccccaggatggggccctgctcacctgctcccctccaacacactggccctggccctttgtccctgccccactgcattttttgttctgaactcctgccatccctgtttctgcacaagggcttcgtctcacagctctgtgagtcaatgctgggagagtggggcctctggctccctttcctttgcttggggctcagcagagaagtcagaaaaggccactgctgcccagacgtggcacactccctccccttgtttttcttcatcaagatctgggggaaggggccagctctgccaggaactcaagtcagctcccttcagcacaaaagggctacaagggaggagctagaccaccagctgggaaggtcagtctctggtagtaccacgagcaccttctgcagagccacttagaggagggaaaggccaggcacagtggcacagagtgggttaaaaagttccgtttattgggggtatcgctgcagacagtactgcctgtcccagaagtggatttcacacagaccagtctctcgcagcagagaggggaagccctccttcccaccccagatacactcttccaccttgtcctagcaggtaggaagaaatagggctgtgccccttcctttccctcccacctgccttcccatgggcttcctttgtgaaagctggattgcctttgagaaacccctgcagccctgagcccaccccttgccccgcaagaaacagccaggttggagggagagaacagcagcagagggccagccacaggctcgatggcatttattctgcaccctgaccaccctggcctcaactgaggttggggtttgatcctgggggagattttctcttgtttaccttcctggcttgtgagggctttgcccctgtctttttggcctggactgtgttctctctcttcctgggcgatgatgattccacaatatcctcgctggacagttctccctgcccccggccattgtaactgtcctcgctctccagctcttcccggctttctgggctggactcggacatcctggccagctgtcttgcgcttaatgatcggctcacgtctggcggggaaggctccaatttaaccgggcttttcttcttagtcaactggcctttcttggcttttttcttcagctttgccttctcatccatctcctccttgtctttctctttttcctttttcttctttaccttcttgatcaccttgctgccctgacccttccctgtggggctctcagagcgccagatggtgatgggcgctgtggagtcaggggtaccagtggccatgctggtgcctaggtcaggggaggcggtggcgggccccacctgtgtcgggatggggggcttgctttcctcctcctcctcttcctcttcttcatttagatcatctgccccacactcatggtagagtggatggtggatcactgccacagagacaggtctgtagcttttgcacctgggagaagggacaacgggggaagtttgacagagagtggggggcagtgccctgtagaggccccttccccatcagcccaccggggctcactcaccagccataccggaatcgctccacatgctcctcctccggtgtgagctcaaagcaaggggactcgatgacatgggagcaggttgggcccgcgccccgggagctgctgctatcctctgaagagtccttcagcctgccacacatgggactctcagcctggctcccatcactcccccagggacccagagccagaagcctgagggacagtgggcttccgctgggcctgcctcaggccaacagacctcctccccatttctcttagagcagagcaaggtgtgcagagctgggactgggctggcagcaccaattcaaagctgaagaggcaaaccaaaggttgaaggggagaccacaatgaaagttcggacctggctctgccatgggtcccccaagggggcgggccctcacctagaattacagttgcagtggttgacagagtgtaggtgcaggctgtggcggacacagtcagaggcgaaagggtagatgatgtgcccagtgcactgcttgtgtctccagcagcacttgtcaggctccttgcagtcacctgagggggcaggagtctgggtcatcagtagcagccgcagacctctgggtcttcccacagctcaagctaaaacctcaccaaattcacctgccaccaccagctgtccaccccaagaagtgtttctgcttcagtagtagtaacttggccgcagagtaaccccatgtcccagcaaagtgtctggttccatgtctgatacacaggagacccttatcaagccccctgcagtcctgtgattccctgttacttctgtcctctccctccagtgggaggcctccaccagctcctgcctgcccctcaaccaggtgctgacaatgagtggcagccctgctccacaaggcgcctggtaggagaaggccctcctgctatggcaccccacagccccaggagcagcagagccgcagcatcctcagttcctacacctgccctggcccacgctgatctctcacagcctggccaggagctaaggcctgcatcatgctccttagcttctgactcgtccttccctccccacttccccctcctcccttctccttcaagcccctttttttctcctgcctgacacctttctcactcccctcccttcccatgcccccttcttgatcctttccctgctcttcactcagcaccttcccacactctccccagtccctagagccccaggctttcgaatgacccacccccagcctaagcacccttttaggcagcacagagaccacatcccctttcccagggcacaggaagaagctgctggggtgagaatttggggttagggaaaagccctggagaaaggcccccacctctgctgctcagctcaatgccagtcctgaagacaggagtttccccggtctaccaccactgcctcacctctgacactgcctaaggcccggctgtcccctcaggcctctatctcaaaggtaagcccatgaggcgactctgcgcctctcacagcccagaatctcactcacacgacaaaggacaagggaccttacctcggattccccagcactcctaggggagggagggagcaggcactggcttggggtgctgtggctgggttaccctcaaacaggccgaggattgtgcctttgccagcccccacgaggagtggaactagggtgagacctcataccggccaccagccaggaatgagcccaggctgtgggtgtgagtccaagtggcctcacagtgcagcagcttggcctgaggcttacccacatttcttcctccttcccttccccacacaaggctgtgaagtcctgggtcctcactacactgctgacccatgggtgatctgtgtctctctcctcccctcttgtaccctttatcccccgggaagatgaggaaggcatgggtatgtggcaggaccctgaaacttcaccaccaccttggccttcctcagcacagctgagctgggccaaagggcagcatagtggcaaagtgccctgaacttgtagtcaggcctaagcccaagtcgtgggtctgtcacttactagccgggtggcttagggcaaatttctttacttctctgagcctttaatttcctcatccacaaaatgggatggtggtcataccaattttgcagggttgttgggcggactcaattcacatatgtcaaagatacttatgtgccataaagttctatataaacgaatggggtgattgcggccttgagaaaggggtcccctctggcatctgtaggggatgggttgaggatggggcagcttcaggaccacacttccctccctccctgcctcaggaccaagcttccaccaggtgtcagctttcccaggtgaggggtgatgaggatcccctgggtcaaaggtctcctggacccaccttcagagaaggtagacacatcagtgctggacgccacaccagccagcagatgtcctctctcccagctgggtaacctgtttacatctgagagagcatagagtggcagtggtggcagcagccccctccctgtgccatttattcaccaaacataccccgagaaactccacatgtcaggccctcgctgcatcctggagatgcagagattaaacaacagtccctgctcttaaggggttgcgggggggggggggggggtggggctatgagggggaggggagagggggaggggagagggacacgggaggttcatgacagtaatgtgatgcagatgctgacagggaaagggtagcacaggacaagggccacctaccaggactggaaaggaggactggggactatggaagacttcttggaaggagcatcactagagttagtgatgaataggagccagccagggtctaggcaaggagggacagctccagaaactgtcccagggtgtgtggagcctggacagaggatgaccctaagcagacctccaactggggtggcagctccctcagccattagcagccacaagacagtctgcccctttgcctttccttcccacaactagctttatcccttgaggcactggacttgaggtctgcttaaggaagggaaactgattgcttggggtcttcagcaagccttcagtggcacttggtcatcctcctataagtctctggtcagctcctcctcctgttttccacagcacggcaagtactcaaaatttgttaaatgaacaaaagaatgaatgaatgactttaagcacttcctggaaactcctgcaaccactgtttctctcagcagataatttcaccgccattatctgtggacactccaaccctcatcaactttgcttgcctgggaaaagggtgtccctcctttctcatgcccaaagcatctatattttaggtcccagccagaagtgacaccttctccttctttactggcttcttttttccccccttacaggctatagacatcataaaacaaaacactctgtcaatcctgtttctcctaccactgcatatccccctttcaatccaaattgattaactcattcagaggacatatgttgggtggcttccctcggcactagaaaagaggcccagtccctaccttcagtgagctcagtgtcttcacttctttcttctcttccagccacctgcaacatggcagccatccaccccccaatctgaatagctttggcaaaggccaccagcagtttcccagtagccaaatccagtgggcttcttatctcatttgaccctgttttttgttttgttttgttttttgtttgttttgttttgagattgagtctcgctctgtcgcccaggctggagtgcagtggtgggatctcggcttactgcaccctccgcctcccgggttcaagcaattctcctgcctcagcctcctgagtagctgggattacaggtgcacgccaccacacctggctaatttttgtatttttagtagagacggggtttcaccatgttggacaggctggtctcgaactcctgaccttgtgatccgccctcggcctcccaaagtgttgggattacaggcgtgagccactgcgcccggcctcacttgaccctattgaccaatgaatctccttcttctgcaaactgttccttgggcttccatggcagacctcatctttctcttccttctctaaccagctctttagttcttccctgtctcctttgctgtctcctcttgttttgttgtatgccttaaattggtgattacaagagttctgacttggtcacctcctcagaaggctctacaaaagcatgtcctggataacttcatcaacttccatgttttcaacatccaccaatgaaatgacataaatctgtaatcccatcattttgggagtctgggccgggcacggtggctcacgcctgtaatcccagctctcagagaggcaagaggcgggaggatagcttgagcccaggagttcgagacctgcctgggcaatatagcgagaccccgttctccagaaaaaggaaaaaaaaaaaaaaacgacattttgggagtctgaggcgggaagatcacaagtccaggagttcgagaccagcctgggcaacatggcaaaaccccatctctacaaaaaatacaaaaattagctggcttagtggtgcacacctgtagtcccagctactcaggaggctgaggtgggaggattacctgagcccagggagatcgaggccgcagtgagccgtgatcacgccactgcattccagcctgggcaacagagtgagaccctgtctcaactaaaatatatgcctttgattctaaatccccaccacagccccattctatggatgagaacacagaaactcagagaggataagtaatttgtccaaacatacattgttaatagactgtagaagtaggattcaaacccaggtcttcctggttccatagcctatgctctttcagccctgtctacttactgttggctggggacacacccctgtaaacaaaggtcattctgtatgtgaagctccacagccaagcctttttttttgttttgttttgtttttcttttgagagagtctggctgtgtcgcccaggctggagtgcagtggcgggatcttggctcactgcaagctccgcctcccgggttcacgccattctcctgcctcagcctcccgaggagctgggactacagacgcccaccaccatgcccggctaattttatgtatttttagtagagacggggtttcaccgtgttagccaggatggtcttgatctcctgacctcgtgatccgcccgcctcagcctcccaaagtgctgggattacaggcgtgagccaccgcacccggcccatagccaagccttaaaaccacattctgcttgagtgagccggcgaggcagaggttgcagtgagctgagagagccacagcactccagcctgggcgacagagtgagattctgtcttataaaataaatcacgttcagctccatatgcaaaacctgtcctaccaggccgggtgcagtggctcatgcctgtaatctcagaattttgagaggccgaggtgggcggatcacttgaggtccggagtttgagaccagcatggtcaacatggtgaaatcccttctctaataaaaatccaaaaatcggccaggcatggtggcacatacctgtagtcccagctgctctggaggccaaggcatgagaatcgcttgaaccccagaagtgtaggttgcagtgagccgatatcgtgctactgcactccagtgtgggcagcagagtgagacggcgggaaggacaggtgtttttttgaggcacagtcacttcctactgcacctgcttttcagctccaacactaccaattcctcaccctctggttttactcaatctggactccacagcctcccttatccaccctggaccctaaagtcatgccgctgggacctcagccagggtgaggaaccaaaactcctctgccttgctgtttcaggagccaccatgaaagagacacacatggccaggcgcggtggctcatgcctgtaatcccagtactttgggaggccgaggtgggcggatcacgaggtcaggagttcaagaccagcctgaccaacatggtgaaaccccgtctctactaaaaataaaaaaaaataaaaaaaatagctgggcgtggtggcgcgcgcctgtaatcccagctactcaggaggctgaggcaggagaattgtttgaacccgggaggtggagtttgcagtgagccgatattgcgccactgcactccagcctgggcgacagagcgagattccatctcaaaaaaaaaaaaaaaaaaaaaaagcacacatgcagggtcagagcctgtttactctccactcactagctcccccagagctcggacacccatcagctctgtttgtgaaggagacgaggggaggaaggacaaagggggagacgaatttagtaactctcttcagagctgagaaaagcaatctgctctttagttccagaggacaggaggagacctctgaccagcagcagtccagagttcctgcagcaggagtgactgacaacacacacaatgaatgaggagggtgatagggtgaaagaaagtgggaggcttatggcgtctttccccgtgaggcgttaatcggcgcacaaaggcctaactcaaaactcacaagttatgctcatctgtacagaatcctccccgtcctgcggggccgaggagctctcctcgacctcgaggcactgggggtgggcaccagagcagccgaaaggagtagggtgggaagggagggaaggagtagggcgggaagggagggaagaaactaggagaggaaggagggaagaggaggaagcaagggaggggcagtgcgcccgcgtctccttggaaatgcctctctggcctcgccgccgcggaggtaattgtgatgccacgggtggaaccctcagtctccttggtccaccctcagggtcgatggaaccgcccgctcccgccccggcgtccgggtgggcgctggtccacgggctccagccaaggccggcgcttcaagggcagcggcctgcgcccggtgccacccagtccgatagccgagcgttccagctctggctggaaccagacttcccgcccatcccgcgggcgacccagcagggcctcaggaccccagtcctcaatcattggcccgcggctcgacgcgagcccgcccccggccctagctccgccccggccctagctccgccccggcccagcactgggccccgcctctctcgttggtttgcccgtctccctcgtcggtttgccggcttcccgcgtgcgccgctcggggtctgcgagccgggccgcgccctctgcccagcccctgccccgcccctcttaccgcggcatctgctctcatcccacgagcgggccttgggctcggtcttttccttagtccatctttcaattgtgagcgtcgtcctgacccacatcgctctccgcccaggtcttcgtctctacaggactcttgcgtgaagtccaaccctgagcctcagcccggccgagccctcggcccagccgtgaactccagtctcggcttcgcccccgcctagcccctaaccccgcctcatgctggcgcagcccccgccggcctccccagcccggctccaggctgcgtagtcttcccagctgggtctcagcgtcagccgcgttcttcatccggggcctccggcgcctcccaggcccctctttatctcagaccttaaccttacaggcccagctctcaccacccatctctggttccagcttgcagtccaaaccccagattttcaccctgcctccagatcgtagccccaattcttagtgttacaacgagccttgcccccagccccattcttagccccgccccggccattctctaaaccgcacactcccgtcccgctccccgccccaccgacccttgggaacccagccgcagccccgcctctgcccgctggcgagagagcgaaccccatctctacaaaaaatacaaaaattagctagtttagtggtgcgcacttgtagtcccagctactcgggaggctgagatgggaggatcccctgagcccagggaggtcctggcgtcgccatttcccctccaccttccgggcttcgaggtccctccgcctctggtggagcccgggcttcccctttctccgcccacaggcctctccgaagacctaactccgggctgaggacctgatgtcggctcccagcccctgcgccaccccgcagcgttcccgcccctggcccccaggggacaccctattctagagacaatactgcccaatagagagtcgtaagcttatcctgatagacaatctggagaacagggcaggctgcattcataggaacctcatcccagtgacacccctcacgccctcaggtacaacatacacactctgcgcatgcatatatcacacacacacagaatatactcaccacacacagactaatacaacatgcacacggaacacagaactcccacacccggtgcagcacaaacaccacacctggactgtggtgctggcttcacacacatctgttaacaggcaaggcaagggtgaggagcccagtgctgcgagggaacagaaatggaaaaaacaatcacaggagagtgtgaaaagaagttatggccatatcgacgacattccatgcaccacacccctccatttctcttggcaccagcttccaaagccaggatgaagaggaggagaaaggatggggtccacaccttgttttctccaccatcatccaggggctctgctgctgctactattgctctgcctgatccccaccttcactttcctccagacccaagtccggagtgggtagggctgctgcccagaccctccttcccgtggtagctctagagagtctaggaactgcgagggaggggaagccaggagaagggaagtgtgcagaaaaaccaaccatcctggtgagaatggaaccaggaatggaacagacagagcacttggcaactgggagccagaatctgccttctaacttggacacccccttagcctcccaggatgacacgaggccataagtcctcctttgttgacccagatgtctgaggtgcttccagctactctggaactctgggttagatgtcaacagggagccagggtcttggtcacctttctttcttataaaagttaatggcataaacaaccaaaaaaacaaacaaaaaaaaaaaagaaagaaaagttaatggttataactcctgagttcaagcaattctcctgcctcatcctcccaagtagctggagttacaggcatgcaccaccacgcccggctaatttttgtattttattttatttatttttttttatgagacagagtctcgctctgtcacccaggctggagtgcagtggtgccatctcggctcactgcaagctccgcctgccaggttcaggccattctcctgcctcagcctcccaagtagctgggactacaggcaccagccaccacgcctggctaattttttgcatttttagtttcaccatgttagccaggatggtctctatctcctgacctcgtgatccgcccgcctcagcctcccaaagtgctgggattacaggcatgagccaccgcgcccggcctaatttttggattttaatggtgacgcgggtttcaccatgttggccaggctggtctcgaactcctgaatccaagtgatctgcctgccttggcctcccaaagtgctgagattacaggcacgagccaccgcaccctgcctggaaaagtacttcttaaagggaaggcaagaaaagggtgaaaaaaagaaaaagattctccagtggtgaaaatttgggtataagcaccaagtaggaggacacgtgtggggaaaggatcaggggaaagggctctcaaagccagccattcagacttcacccagtgagggcccagtgcagcccccaaactgatgtttcagctcccagcctacctgaacctgcccaggggccagggatggccagcacagcatccccaggggactctagtgccaaaatggccacacagtcatgcccattccacatccatcatccccaacaaagaactccagccccaaagtgctcgtaacaaagaaattttaatgcataaggcacagtgagaggctggaatcattaagcatcctcaaacacaaagggcccagcaggctgagcaaaagaacagagacactctccctcactaccactgggcgccctggacagtcccctgaggagtagggggcatccagtctttggcacggtgcctgggggcaggaagtgactagcatgatcccagctacccctctgtgggaatactgccaccaagaggcagctctttggtctggataaagtcagtgcaaatgtccaggggtcaagctctggaggaatgagggtggcacagtgccctagggctgggcagtctctgaacagtctcctcagccctcatgggcaacatgtgggcttcttcttgctggcagttaggtagaggttgctgtcatcactgttgatgcctaaagaagggtggaaaatatgtgaagcagggattggaggctcactgtgccctctgccaccctcaaccaggcaagcactcacggacaacatccccaatgcgtcgagcccccgatttctccagctcagccagcacattggcctcaaaggtcagtgctgccacacggaagaagaattctcggacattctcacctgacacagagagcagataggtgctcaggggcagtgctgggtctggggacacagggcacagctggaggtgtagcagtgagaggagagccaggcaagagtgtcacagcagagccctaaagcctccaactcaccagtgagagatgagactgcccagtactcagccttcatctcctgggccacctggagggcgtctttctccatcagcgcatactgagcaggggtctgagggaaggccagagtcagaggggggcattccctcaccaagctgggaagtccccccactggcacactcacactcagatccttcttggaacctacaaggaagagaagcacactggaagggtcattctccttcagggcatcggccagccactgcctgccatgggaggtggaaagtaagggatgagtgagtctgcagggcccctcccactgacattcataggcccaattaccccctctctggtcctacatgcattcttcttcttcctgaccacccctctgttctgaaccctctcttcccggagcctcccattatattgcaggatgctcacttacttggtatgttccagagatgccacatcattcaggttgaagacaatgatgatggctggaagagtggcagaaacagccccaggttgacagggaagacactactgctcatttccccaatccttccagctccatatgagaagccatgtgcactctgagacccacctaccccacttcacccagccccttaccttgagctcctctatagtaggttgatgcaatgcatttgaacctctcctgcccagcggtatcccaactggaaggaaggaagagtgaagcacaggtatgtatcttggggggtgtgggtgctggggagaagggatagctggaaggggtgtggaagcactcacagctgcaaactgaagggaatgcccagcacctcaaatcgttccatctcgaagtccactccaatggtggccttgtaattcttatcaaaggtgtctttgcagaacctgagagggtaccagatgctgtgatctggagccagcccacctggctaggcttggccccaccctgcccagctcagctccagcacccccttacctattaatgaggcaagtcttccccaccgacaggtcccccaccacaatgaccttggagatcttaaatctgctggacacaagagtgggcaaggggagtgggcacgagctctttcaccctagggagttccaatgctcccgactaggtccagaaaggtagctgcacccaggctgagggtattatagacaccaggcatcccaggcagctgcgtggacaggtgtgctggggaggaggagtgttttgtgctccagaagcagagagacatgaatttgaatcccagctctcacactgattagctgtgtgactttggacacgttatttagcctctctaagcctcagtttaaacatttaagtaaagttagtatatattttactgggtcgttgtgaaggttaaaatgagataaatgtcctatattctaagacaccctcccccccgcattttaatgtctgaaatcaggatatatcttaagtgatggacttttccattcaataaagatgatagtacccaacactgcctggcacacagcaaatgcttaattaatggtgccaactgttatcagtattacctttaaaacccacaataagactcatccctgtaagcacagccagacccctgccctggggctccatggatgctatgtggggatctgagcaggtgaccaccttcccatttcagacaccttagtctctactcagaaatccagctgccacccttctacccaaccccatctcatagaactcacaacaaccttgttgggagaaaaggaggggatacaggggcttaaagagggggaaataaccatatagctggtaggggctgaaatgaagccccaagggggtggttgtttaccctcgctatgactacagagtttcctgggacctcctctctttgttgtgggtgtccctaactcaccccacggtgcctgtccggtgctcctggcaggcgcaggtgacgcgggggtggaagtctttgtgcccgtgcaaagcggcctccttcctcaggcacttagtgggaaggatggaagagaatggagcttcctactcctggcccttgtcccgcagccaagcggcccgggtaggggtggagtgcagggaccacccagaagcaccaggcctagctgggtggcagggctgggcccagtcctctaactggtctggtgccgcctcctcctcgcccacaccccgggctgtagactgaagcccgacgtggccccggcgcctacctggggcagctccgccaggacgcgatccctccgcacgggtgccagaatgttcatcctgcctgcggccttgcagggcgccctgagaaggcgccgaggccggatccgcgtcagcgacccgggcgcgtggagacccgacgatcacccgcggccggggtgtcccgactacaactcggggccacggggaccctacgggagtccgcggtctcggagacgctacgaccaccgcgggccacggagatgaaacaatcacccggggccgcggcgagcccaaaatcacccgggccctgggcgtcccgaagatgactctggggcgaggagactcttcggccgccaattgggggcggggagtcccgtctggtgggggccgggcccgcgcagaccctacgattacgcggggccggatagttcctacgattacgcggggccggatggttcctacaataacccggggccgcggagacccgacgtcatctcggggctgaggctgccctaccattacagagcggcccgggggcgcggagcggccccgccacacggggtcagtgtgggcaggggcggcgctgccaaggcccgcaggccgctggaggagggggcgaggggcccagtccggctacagggcctcgagtcccactccgctcgggctccgccaacgctgtaacacgatccccggaaattcctggagaagggccgccccccgcccctctcctggcggctccaggcctcgctgcccgccctcgccaccccctcctctccacccttctgcgttgccccgctcaggctccctcttttgacgcttcaccgggcaccaggaccgccccgacccaggctggagcctatccagatagggactccccaggctgctctcccctgcacctctatacccggctgcgccttcatggggacccttacccagccgaattggtgatggggaatcggagactgctgcgcagcatctggcgatgccaggaaccagcagggaggggaaagggggagagaaggggcccaaggagaggcggcgcttccctcctcaactccaggcctgggaggtgactcatagagtctgccccctctcgcccttctgccctgggaggtcgggggtgaggatggtggaggggaagcgtgcgaagggggtgccagggttagaatgaggtgcccaccgaggagagagacgtctgaagtctggcgtcttttccttcaaggctgctgtgtagattgtgaggtgggagggctgaagatcaagttccctcgagggaggttaaagaagggctaagtggacccggaaactctgctcttcggggtggtctccgctctgggaggcggggactcccctctggtatgggtgttcattgttctggccccattggaatctatcccccagggacaactcctttgtgcaaagtcctgcaggatagaagagggggcagtgcacaatcaatttcaccgtcaaaggggacatgtctggttttatgaagggagagggaagaagaaaggatcaagtggggatgggttaggcacacaccttaggagaagcgaacctgagtgttaagaaacctttctctgtgtctggagctgaatttgaggatgtaaagatgaccaggacacggaagggaagactagtttagggcaggggattgtgagtgaagttactaaccggaaaaactagcgaatcttggagaaatgtgtggaattttcatagaacttcaaatgcattatcaggaaacgcagtaaaacttgacagtatcagtgtcgcaggtaaagaggggcaggtgtggccgccttgtacttcctctgacacttccccctcgtgactcgattatttatttatttatttatttatttattttgagacagggtctcactctgccacccaggctggaatggctcattgcagcctcgacctccagggctgaagcgatcctcccacctcagcctcccaaggaactgggactacaggcacgcaccaccacgcccggctaatttttgtattcttttgtagagacagggtttcgccgtgttgcccagggtggtctcgaactcctgggctcgaagcaattcgtccacctcggcctcacaaagtgctgggattacaggcgtgagtcaccgcgcccggccctgacttgatttttttctgccaccaaatcactgtgttattgataaaccacattcctctctggacctcagttcgaccgagcaaatcctgctccagcactctagaacttagctgtatctaactcccgagtcaatccaaatgtgttctttcctcttggcagcgttcctgcctcctggcatggcaatcctcttccctgagactggcagttgctcaagataggaagctcccgggaccagacccgagcgccagccggctacgccgtccgctggcctgagcaaataaacgcgtgtcttcaaaaaactacaatccccatggtggcacgcgcctgtagtcccagctactctggtggctgaggcaggagaatggcgtaaacccgggaggcggagcttacagtgagccgagatcgcgccactgcactccagcctgggcgacagagcgctcaaaaaaaaaacaaaaaacaaaaaacaaaaaactacaacccccatgaagctttagtgcctttgaggggaggagtggcgcatgtttgttcacgcacgaaaaagaaattaaacctaactaccgttcccagagggcgccgctctgcaaattacccaatcagctctaagtacaaagcatcgcgagtctttagtgctctttggcgctataagcccgtgggaacgagcattggagacccttttcacaagatggcgccgaaagcgaagaaggaaggtgtgtgttggtgatggggccgcagctggtttaccggggattgccgcgccgcagagcgaacgaattgggaacacggctgctgggctaagccctgagggctctgctccggggctgctccctgcgtttcggacacgctgcagtatacgtgggccgcgtgggcccagcctcgtgggctgagttccggtagagggagttgggggggggcaacgcggcaggcatcatccgccagggagggccagacattcggttctgggaagctacatgcatccactggttggagctccatgtccccgggcctgtaaggaattagtgccctcagctttaaccattttccttctggttcatgttcaaccgggctacattacccgcccctctctccgcagcgtggttttgcgatggggtatgtgtaaaattcgtaggacattttctggaaagtatcaagcgttcattcagtgctactttgtttcatagtcgtatccctggagttacttagagttggtcgctttcgcctctggtatcgtgcatatgatggaaaagttttaatctcctgacacttgtgatgtcttcaaaggaaccactgatgcacctgtggccagggtggcccactgcagttcttggggccggaagtgaccgatttctaaatcccgcacccacgttttctttccttttctcccagctcctgcccctcctaaagctgaagccaaagcgaaggctttaaaggccaagaaggcagtgttgaaaggtgtccacagccacaaaaagaagaagatccgcacgtcacccaccttccggcggccgaagacactgcgactccggagacagcccaaatatcctcggaagagcgctcccaggagaaacaagtcagtactgccccctgtacccatgaaaagatttgggtattctccattggtaatttggaaattcactcactctgcgtgatggtttctcaaacgcaaattgtgtccagtgtgcttctctaattggaagtatgaggagattgtttctgctgcatttacaaaactggcaggatcagcccagaggccgggcgcggtggctcacgtctgtaatcccagcactttgggaggccgagggggggcggatcacttgaggtcaggggttcgagaccagcctgagtgacatggagaaaccccgcgtctattaaaaatagaaaattcgccgggcatggtggcgcatgtctgtaatcccagctactcgcgggaggctgaggcaggagaatcgcttgaacccgggaggtggaggttgcggtgagcggagatcgtaccattgcattccagcctgggcaataagagtgaaactctgtctcaaaaaaaaaaaaaccctgagtctctcaaaatttgttaggttaattattgcttcacatgtggtcacggtttgaaaacttattttggggggagtataaagtagaatacagagattccttgctcatagctcctactgctatcgggaacaatccttgagggtgagaacgtggattgattcttgattgatagtggggattccattatctgtatttggcagttatggcctgctgcggtgtatagaagcttctttccattcattttcccgaattttcatactgctcaaggaacagttgggggggaatgggcagaaggttgggcacttgagtatttgagctatcggtaataactgactttttagggagcacagatttgagtagagccatggtagtagttagtaccaatgggtttttgctgcttctactctttcttaacagaaaaagtggattgtgttcatataggaaagcagttcacagactgtcttcctgcccctcccgccaccaagctggacctagaatcaagtgtgactttaaatggggaaagctgtgttacagttgtgcttaagccactgctgtggcttaacctcacctatgcataagaatttgctcgtggctggccgggcgcggtggctcgagcctgtaatcccagcactttgggaggctgaggcgggcggatcacgaggtcaggagattgagaccatcgtggctaacacggtgaaaccccgtctctactaaaaatacaaaaaaaattagccgggcgtggtggcaggcgccgctagtcccactactgagtcccaggctgaagcaggagaatggtgtgaacccaggaggcggagcttgcagcgagccgagatcctgtcactgcactccagcctgggcgaagcgagactctgtctcaaaaaaaaaaaaaaaaaaggaatttgcccctggcccgattctcctgcctcagcctcttgagtagctcggactacaggcgtgcaccaccatgaccagctaatttttgtatttttagttgagagggagtttcaccatgttggccaggatggtcacgatctcttgacctcgtgatcagcctgcctcagcctcccaaagtgctgggaatacagccatgagccagcacacctggcccagagatgattctttaatcacttgaggttgtaagagcccttcaagagaaagaaaatgcacaacgttctgcccctgggattggggcttcaggcccttagatttcagggtgcagatgatgacactgtaaagcgaccaaagtctgaacaaagtgattggtacctcgttgtctgatgcacctaggctctcctggctctgggctccaaaagaatgggcccaggccaggtgaccccattttgcctctcccaggcttgaccactatgctatcatcaagtttccgctgaccactgagtctgccatgaagaagatagaagacaacaacacacttgtgttcattgtggatgttaaagccaacaagcaccagattaaacaggctgtgaagaagctgtatgacattgatgtggccaaggtcaacaccctgattcggtgagttgggcctcaagggatggggagcaggctggaccagcagtctggagccaaaaaaacctgcattccatgaagctttttgatgtttaggtagtcctggtaatgcaggactacacgtgtagtccgagctatgcaggaggatctcttgaggccaggaatcacccatgattgccccattgtactccagcctgagcaaccaagcaaggccctttttaaaaaaaaaaaaaaaaaaaatcccctggacctttcagcaggggaaaaaggttccttgacttaaacttggtgtaggtttagcagtgtgtgtgagccttgaggcaggaattacaggctgctttagttacagacctttgtgtggacctgaggctttctaggacttgattgggggttggtcctcattttctgggtccctacttctattgggaaaggcaactagagtgcgacacgtggcagattaccttggtttaagtcttaatgtggcctgtggtgtttcccataagagaattggctttgtggcttcatggtgtcctctgggctaatgatggaaaaatcattattggaaaagaatgacatgaacaaaggaaccactgaagtgccggaggactggaggaggaagggggagggtgtgggggcagtgagggtggcagggactaaggcttccttctctaccctaggcctgatggagagaagaaggcatatgttcgactggctcctgattacgatgctttggatgttgccaacaaagtaagtttccttcctacaaaccccttaatgctcaccccttgggtgcaaatgatgcatatgttagcgaccaaagcctgatctttgctgattagtcataattaactgactgcacccctatccttgacaaaccttatcctcacattcctcattttgctttctaaaaataacattccagcttaatcttcatatttcaactccagtaacgaggctcccttttgtttttcagattgggatcatctaaactgagtccagctgcctaattctgaatatatatatatatatatcttttcaccatatacatgcctgtctgtcaatttctggttgggctgggaggccacacacacacactgacatgacagggcttgggcaagactcctgttctacttatccttttgaaatacctcaccctgccactccaccatgtatgatcattccagagatctttgtgactagagttagtgtcctaggaaaaccagaactcagaacttgcctccatggttgagtaacaagctgtacaagaaccccttttatccctggaagaggctgtgtatgaaaccaatgcccagggtttgaagggtgttagcatccatttcaggggagtgtggattggctggctctctggtagcattttgtcctcacacacccatctactatgtccaaccggtctgtctgcttccctcaccccttgcccaataaaggacaaggacttcagaggagtactttcattagtgttttcaatagtgtgggcgcaggctcagaaggtggagaggctggcctcagaggacacccaggcttggggctaagtcccagtgtccatatgaagctgtttctggccttgtccgtttttgttgtcccaggctctgtgcccctcactcagtcaagaacttgtctttgtgttgcttcttggggacatgctcagggcagaagtcagagcggaggaggcgggaaaagtagattatgatcatcacgtccagcatgagcaggatacccagcaggaaggtgcccagggtcctctggttcacataacgcaagaagaaatgggtgaggtaggcctgaggggccaggcggaagagaaagtacatgaccaggttcacatacttgttaacccggtagaggagatgatcctgggcattactgattttcatcatcatgcgaatggtgaggaagatgttgctgacttccaccagtagtgttaagacacccccaccgacaaagctgctccaaaagatgccggagaagaaggcacccatggcctagagggaagaaagaataggagttagggaacccagatgcagacgctttcctggaagtttggggggtgtggctatcagattgagggctggaaaatcccaaatttccccctggaataatagtttatagtgggtaagatgctttgttttgttagttcaacattactagattttgattgctgctcacagctggctgtgggtgatgttcagtctaaagaggcagtgaaaccatgggttgctggcctcagtgaacaagtacagactgccaacctccagcatcctagcataagaagtagcacacaggtcgggggtgggtggtaagaaaacacggccttctcccagattcagaaagacggagctgagactagattactgacaccaggcctataccacatagtctgcttctctcttaccatgacgtgatggacaaggtattcccaagaggctcgcgtctgtccgctagccacgatgtccaccgtatcgtggatgaaataccctagtggagggatggggcaagagatcatgaactgaacaagcagcttccttctccctgtccccaatttgcctcccgcttcctgggcaagacctacccgcagagaagcaaacgagcaaatagccagaaagtgaccacgccgtctcaatctccactaacatgtcaggagtctgccatacactggaaaggagggaagaggaggctctgcatttcggcaccctcaaggaccatcaacttctcggttacccttcgcagccccgggggatcctgggctcgcgctagtggctgactgggaagctaagagtggctgggcaaaacccaagagcctccagtttcccaggggcgatccccctcccctggggccactgcggcttttggttggataggataccaaacgggatcaggtgagactgcgtggcctcagcccgccagtgagcgatgggggtagtaacacaagagccggccccggctccccgctcaggatcccctggccacctcatttccacagtcgctcactcaccacagcagtgcccagatccccgacacaatggagtgagcgaaggagacgagcaggttgtgccagcgccaggtgcgcagggggtcggcgcgcacgtgcacgggtaggggcaggcgacagagcgcgcgccggagcgcccggaaggtcagcgtggcgcccaggagcagcggcagggcggggtgcagcagtcggggcatgctggccctccctgccgtccgccctcgaggccgcctcctaggtctgttctgggaaccgggatccctctcgggccagtccaggccggccgcctctcccgccggccgccagccccacacagttggcgaagccctctaggccccttggctcctcctcgccctccctgcgaggcctctgcccccgcccccagccgcccgcgcccccgccccgcccgcctgcccccgccccgtccgcctgcccccgcccctcaggcgctgctgccgcgcgagccgggtgtccccgtggcctctcggccaccggccggctcccgcggacttcgggtaactaggagctgtgctgggggcgtcgtcgccgagacacccctcgctggcgcctcccgactgccgacggagtccccgctgccctcgctcgcctggcctcattaacccgcgtccccacttttccccgggccaccggctaccccgccctgggcgggtaccgcgagagctctctccgccctctactttctgcgcagagctggacgggacccgacacgcccacgccccctaagtcctggtcctggggtgggctccggagccccgcgtccgacagtggtctccgtgcagacccagtgcccctaccgcaccactcgcagtcttctggccggagtcccgtgtttacctgtccctcccgcgcccgcgaggtgggcacttgggaactgctgagtaacccatcgccacctcttcccgccggctcttaaactcctggggccgggcggctgtcacagtcctccctcagacagtcccggccctcggcccggctccccggaggctgggcaagcaagacctccgatttgccgggacagctggagtgacccgcgctctccaagccggtagcttgcagcagttgcggctcctagccactaggtgtcagcctgccctcactgtggcgcgggctccccctcccgcctccgagcgaggcagctgctttcggggagagtttaggtataaactctgggcgaaaggaggagcagctgagagccagcgagggaagttaagcggagatgagagcggggagggagaagagggtagtaatagaggaggggcgggaagaagcgggggaggggaaaggtgctgcgggcgggaggaagaagccgagaaaacctgaggcgcaaggacccagggaccaagccgtttgagtgttttcctcccctatggctccaaggttacacattaacccctgtgggactcttaagtcaaccaaagcccagtcggtttctaggtgagaacacgggtgtcctgggtgagcggctttcccgcccctccccttggctcacagagctgctctgtccgccggccgacaccggcctgagccagcgcccttccagcagtcattccacgtgggtgggtttggatacccttgcgagagccaggacaggggcagaagataaaacgcccctttcctcacaccccttgcccactctgatacagggacgctaaccttcagctagtgaccatcctcctcctgaatactgatgttttctttctttctttttttttttttgagatggaggctcactctatcgcccaggctggagtgcaatggcacgatctcggctcactgcaacctccgcctcccagattcaagcgattctcctgcctcagcctcccgagtagctgggattacaagcgcgcgccaccgtgcccaactaatttttgtatttttagtagagacgaggttttaccatgttggccaggttggtctcaaactcctgacctcaggtgatccgcccgcctcggcctccccaaagtgctggaattacaggcgtgagccaccgcgcctggccgaatactgagtttttctagagctcccgcagagcaggagcccgggagaacctggaattaacctcacttccggtaaagagcctagctggtcacactaaccagccccctgcctctaggcttttgccttgagctcatttcggcgaaaccgcggtctttccttctccccttgatgctttcaggtactgacccactaccgcccccatcttcccccatgggaagatgagcactgagggcagattaccctcctgcagcgcgtgtgtgaaaggggagttgagagtgctgacgagcgcggcgctcactagtcgggacggcccgagaccgtgtcatgtcctcttcaggtgaatcaacttgcacgacttgggatttcccccgtccctccccaggcaaacacgaaaccaaccctgctgccttctcccaggagcgctggtctcggtcgttttgggtgtgtttatcgtttgcgtgccaaggagaacccgctttctcctgaaatagcgtcactcgtgggcaagaagggggtcaatcttctcttcccaccccttcccggcctgtggggtttaactctcgggaacgcgacatccttttagtctagcaagctttacaagggctgggtatatgtgtgggaggggcgggtaccgtgcccgccattgcgggcgcgccctattttcttgccctattcttggacactgcgtggggcagggtcgtgaggggaaaagtgacggcgtgtcgcagcgggaggtgtgtggtgcaggcccacaaatacggacgcgtggcggaacccacacctagggcgctggctccgccccgcaagccgctcgccgtgaaggggcggggcccagagtgggtgggtccgcgcacgcgccgcgtgggggacggaagtgaaactctaagaaatgagatggagaagtacgagcggatccgagtggtggggagaggtgccttcgggtgagccagggctctgggggaggaaactgctaggggatagggaaaataagccccaattccgcccgcgaagtcgccgcccgcctaatcccgccccaaggcgtgagcgccactctgggaagccccgcccaagcttccggtcccagtcccccggggagactccgcctctacggaggccacgcccctgacaggcccattgctccgcccactgagttatgttagcttctttattcattcgttcaacaaatactgagtgccagctatgtatgtcaggctttggccgctgggtatatagttagaaccggaacgggcgtggtcttttccctcttggaacttactgactgtgggaaagttatacaataaacaaaacattatgaagtaagaagttatagcagttatgaagtgttattagcaggttgtgaggatagagtacattaccagtgagaatacttatatgagatggtcaaggaagaattctctgagaagggagattgcttgcttgcttgattgatttttaagacagagtctccctctgtcaccccggctggagttcagtggcacgatcttggcacactgcaaccaccacctcctgggttcaagcaatcgttgtgcctcagcctcccgagtagctaggattacaggcgtgcgccaccatgcccggctaaattttttggattttttttttttttttttttttttgaggcagtctcactctgtcgcagtggcgcgatctcgagtgcagtggcactatctcagctcactgcaacctctgcctccctggttcaagcgcttctcctgcctcagcctcccgagtagctgggactacaggcacgcgccaccatgcccagctaatattttttgtgtttttagtacagatggggtttcgccatgttggccaggctggtctcaaattcctgacctcaggtgatccgcccgcgccggcctccctaagtgctggaattacaggcgtgagccaccgcgacaggccagaagtgagatttaaggccaagacttgaggaatgaggaccagtagtctgcaggtgaagggagaacttttcaggcaaaggaaatagcgtatgtgaaatgtctcacatgggaaaacagagcattcaagaaaccgagaaagactagtaatagttggaatgtagtgggcaaggtagagaatggtataaaatgtaattgtcgagggcggggactagattatggcctgataacctgagataaaaggttcatttgccacaaacggttttgttttgtttttgtttttgtttttgagacggagtcttgcactgtcgctcaggctggagtgtagtggcaatctcagttcactgcaatctccgcctcccgggttcacgcaattctcctgcctcagcatcctgagtagctgggactacaggcacacgccacaacaaccggctaattttttttttttttttttttttttttttgtgagacagagtctcctctgttgcccaggctggagtgcaatggcaccatcttggcttactgcaagccccgcctcccgggttcaagcaattctcctgcctcagccttacaggcgtgtgccaccatgcctggctaattttttgtatttttagtagagacagggtttcaccatgttggccagcctggtctcgaactcctgacctcaggcgatccacctgcttctgcctcccaaagtgttgggattacaggcgtgagccaccactcccagccaccaggaagggttttaaagaggaagagtgatcctgagacttggcagagttttctgaaaaggggcagggtgcagtggctcacgcctataatcctagcactttgggaggccgagatgggcaattgcttgagcttaggagttagagaccagcctgggcaacacaatgagtccccctgtctacaaaaaaataaaaaaattagccaggtatggtggcattggcatgtgcctgtagtcccaactactcaggaggctgaggtgggaggatcacttgagcatgggaggtggaggctgtagtaagctgagatgagacccctgcacttcaacttggttgacagagtgagaacctatctaaaaaaagaaataatacaagaaaaaaagaaagaaaggaaagaaagaaggggccgggcacggtggctcaggcctgtaattctagcactttgggaggccgaggtggttggatcacctgaggtcaagagttcgagaccagcctggccaacacagtgaaaccccatctctactaaaaatacaaaatttagctgggtgttgtgacggctacttgggaggctgagtcaggagaatcgcttgaacctggaaggcagaggttgcagtgagctgagactgtgccattgcactacagcctaggcaacaagagtgaaactctgtctcaaaaaaaaataaaaacaaaaaggccgggcgtgggggtcatgcctgtaatcccagcactttgggaggccgaggcgggcaggtcacgaggtcaagagatcgagaccatcccggccaacatggtaaaaccccgtctctactaaaaataaaaaaattagctgggcgtgggtggcacgcgcctgtagtcccagctactcgggaggctgagggaggagaattgcttgaacctgggaggcggaggatgtagtgagccgagatcgcgccgctccactcccgcctggcaacagagtgagactccttctcaaaaataaaaaaaatagaaaaataaaaaatcttatcagaccattcctctatattttgtctttctttctttctttttttttttctgagacagagtctcgctctgtcacccagactagagtgcagtggcaccatctcggctcattgcaagctccgcctcccaggttcacgccattcttctgcctcagcctccctagcagctggaactacaggcgcccgccaccactcccggctaatttttttgtattttttagtagagacggggtttcaccatgttagccagtatggtctcgatctgctgacctcgtgatccgcctgcctcagtctcccaaaggcctgggattacaggcgtgagccaccgcgcctggccccaattttttttttttttttttttttttttttttttttttttttgagacggagtcttgctctatcttctaggctggactgcagtggcgcaatctaggctcactgcaagctccgcctcacgggttcacgccattctactgcctcagtctcccgagtagctgggactacaggcacccaccagcatgcctagctaattttttgtatttttagtagagacggggtttcatcgtgttagccaggatagtaagatttttaaattgcattctggggctgggcatggtggctcatgcccataatcccagcactttgggaggccgaggtgggagcatatcttgaggccacgagttcaagaccaacctggccaacatagtgagacccatatctataaaaaaaagaaaaataaataaaaaataaatgtcattctggttcatgtagaatttagatttgagggtgacaggagtgaaagggaccattttggagagttatacagtattttaggcgagaaattatgatgactatagggcaagggctgtagagagggcacagagaattggatggatttacagtattgcagaggtagaaataggatttgcttgtgtgaaatggaggaaagattctagggcgattttcttttttcttttcttttttttttttttttttttttttgaggtggagtctcactctgtcgcccaggctggagtgcagtggcgccatctcggctcacagcaagctccacctcccaggttcaggccattctgctgcctcagcctcccgagtagctgggattacaggcgcctgccaccacacccagctaatttttgtattttgggtggagatggggtttcaccattttggccaggttgttctcaaattcctgacctcaaatgctccacccacctcggcctcccaaagtgttagtattacaagtgtgagccatttcgcccggcctaggctgattttcaagtgtctgtttttttgttgttttgttttgagaccatctcacttggtcacccaggctggagtgcagtggcgcaatcatggctaactgtatcttcaatgtcctaggctcaggtgatcctcccacctcatcctccagagcagctgggaccacagaggcttgccaccatgctcagctaatttttttttttttttttttttgcgagagtgggtttcaccatgttgctcaggctggtcttgaacgcctggactcaagtgatctacctgccttggcctcccaaagtgctgagatcacaggccttagccacttggccctgcctcaggtttctgattttagcagtttctgattttaataactggaggatgatggtagcatttactgagatggaagagactgagcaaggaaaggtttggaggcaggaatcaagagttttattttgaatttgttaaaatttaggatgactgtgagccattcaagtggatatctgagtctagggttcagaagagaagcctgatctggaggtaaaaatttgagacttagatcagcttatagtccactcattcaacaaatacttattgactgcctattgtgtgctaaatattgggctatgcactggggttattgtggtgaacaagaatgttgtagtccctgcttttatggagactaaccacagaattaaaataaaataatatgaatggcttctattcattgagcgttttctttgtgctggtcactgcactcagtgccttacatgcattttctcattccatcctctcaacaaccctgggaggcccatttcattttccagacaatgatgtcacataatgtatcaaaccagataactagtaagaggaggcacccagatttgaacccaggcagtctgtgggaacttagagatcaagactaactttacctcacagtgcctgtggtgaaactgaagtcccacacagcttgtaatcagttctccctgttcccaagttcagtgttctgtgcgcttggttagatgacctctcagtctagaaccctcttccaagagacatcagtcactaggctgcaccgccctgcctgatatgtggctggaggcttagctggtaacctgtccctgtcctccgtatccctaggattgtgcacctgtgcctgcgaaaggctgaccagaagctggtgatcatcaagcagattccagtggaacagatgaccaaggaagagcggcaggcagcccagaatgagtgccaggtcctcaagctgctcaaccaccccaatgtcattgagtactacgagaacttcctggaagacaaagcccttatgatcgccatggaatatgcaccaggtgggccagcctccttacagtggcctggctggagggcctcttacctctgggacaggcagacacagatctcctggcttccctccttggaatgggcatggccaagggttagagttctggtcccaattatctgaccccggctagccccttgtcctctctggtcccagtgccctgttccatacataaaaggagaggggttgttggctgggcacggtggctcatgcctgtaatctcagcactttgggaggccaacgccgaggcgggcggatcatgaggtcaggagatcgagaccatcctgtttaacacggggaaaccccgtctctactaaaaatacaaaaaaaaaaaaaaattagccgggtgtggtggcaggcacctgtagtcccagctactaaggaggctgaggcaggagaatggcttgaacccgggagggggggcttgcagcagtgagctgagatcatgccactgcactccagcctgggcaacagagcgagactccatctcaaaaaaaaaaaacaacaacaacaatggagaggggttgtcgtaggtgtgagaaagcctggatcttgattagtcccttgggccacaggcggcactctggctgagttcatccaaaagcgctgtaattccctgctggaggaggagaccatcctgcacttcttcgtgcagatcctgcttgcactgcatcatgtgcacacccacctcatcctgcaccgagacctcaagacccagaacatcctgcttgacaaacaccgcatggtcgtcaagatcggtgatttcggcatctccaagatccttagcagcaagagcaaggcctacacggtgcctgggcatggaagggacctccagggcactagaagtcttgagggccaggacctaaccctgcctcctcccctccccctaaaaaacccttggccctttggcccctgtttgggtggttctgcaggaggaagccccttggcttgctttgagaagaagctgtccccaaatgggcttatgcacagagcccctggtcttccctccctgcagggctgtgatcccagcttctatcctgcaggtggtgggtaccccatgctatatctcccctgagctgtgtgagggcaagccctacaaccagaagagtgacatctgggccctgggctgtgtcctctacgagctggccagcctcaagagggctttcgaggctgcggtgagtgtatgcaccctccaggggacaactgagaaatctactgcctcgcccagcagcccttggctcaagccacctcaggtttctcctctagctgagtcatgtctctcccttatcagattaccccaggggagggctatgggtgtccctcagactatggatttctgagagtaggtcttgcctcccattagacggagggctcctgagggcagggctgtggctttcccagaagaccctcccaagagcaagacttgagttttcccagcatgctggggtttctgaggatatagctgcagctcccctatcagactagggatcactgaaagccaggttggactcccctgtcagtctgggagtctcctcatcagactgaagtctcctgagggcaaagctgttattgtttatttatttattttttttattatactttaagttttagggcacatgtacacaacgtgcaggtttgatacgtatgtatacatgtgcgatgttggtgtgctgcacccattaactcatcatttaacattaggtatatctcctaatgctatcccttccccctccccccaccccacaacaggccccggtgtgtgatgttccccttcctgtgtccatgtgttctcattgttcaattcccacctatgagtgagaacatgcggtgtttggttttttgtccttgcgatagtttgctgagaatgatggtttccagctccatccatgtcctacaaaggacatgaactcatcattttttacggctgcatagttttccatggtgtgtatgtgccacgttttcttaatccatctatcattgttggacatttaggttggttccaagtctttgctattgtgaatagtgccacaataaacatacgtgtgcatgtgtctttatagcagcatgatttataatcctttgggtatacacccagtaatgggatggctgggtcaaatggtatttctagttctagatccctgaggaatcgccacactgacttccacaatggttgaactagtttacagtcccaccaacagtgtaaaagtgttcctatttctccacatcctctccagcacttgttgtttcctgactttttaaagatcaccattctaactggtgtgagatggtatctcattgtggttttgatttgcatttcttgatggccagtgatgatgagcattttttcatgtgtcttttggctgcataaatgtcttcttttgagaagtgtctgttcatatccttcgcccacttgttgatggggttgtttttttcttgtaaatttgtttgagttctttgtagattctggatattagccctttgtcagatgagtagattgcaaaaatcttctcccattctgtaggttgcctgttcactctgatggtagtttcttttgctgtgcagaagctctttagtttaattagatcccatttgtcaattttggcttttgttgccattgcttttggtgttttagacatgaagtccttgcccatgcctatgtcctgaatggtattgcctaggtattcttctaggggtttgatggttttaggtctaacatgtaagtctttagtccatcttgaattaatttttgtataaggtgtaaggaagggatccagtttcagctttctacatatggctagccagttttcccagcaccatttattaaatagggaatcctttccccatttcttgtttttctcaggtttgtcaaagatcagatagttgtagatgtgtggcattatttctgagggctctgttctgttccattggtctatatctctgttttggtaccagtaccatgctgttttggttactgtagccttgtagtatagtttgaagtcaggtagcatgatgcctccaggcaaagctgttattatcccaggagaccaggggctggagctggggggtgctgccctcacttccccaaattctcaacctggtgccttcacagaacttgccagcactggtgctgaagatcatgagtggcacctttgcacctatctctgaccggtacagccctgagcttcgccagctggtcctgagtctactcagcctggagcctgcccagcggccaccactcagccacatcatggcacagcccctctgcatccgtgccctcctcaacctccacaccgacgtgggcagtgtccgcatgcggaggcctgtgcagggacagcgagcggtcctgggcggcagggtgtgggcacccagtgggagcacaggaggtctgaggcagagggaaacctggggcaagtcctcccttcctgcatgtaggaatgtcaggagggtctttgtccttaggcccccatctgtcctgcagggcagagaagtccgtggcccccagcaacacagggagcaggaccaccagtgtccgctgcagaggtaagtgggaagaggccgccagtccccatggatgccacaccattcccatcagtttaatagtccccatgcactgtacctgcaggtatcccccggggacctgtgaggccagccatcccaccaccactgtcgtcagtgtatgcctggggtggtgggctgggcacccccctgcggctgccaatgctcaacacagaggtggtccaggtggcagctgggcgcacgcagaaagccggcgtcacgcgctctgggcgtctcatcctgtgggaggtgagcaggccagggggtggcctggatgggtggaggtggaggtccacagcagggttggggtgctcaggcgctgcccatccccctgcccctgcaggccccacccctaggtgcaggcggaggcagtctccttcctggggcagtggagcagccacagccccagttcatctcgcgtttcctggagggccagtcgggtgtgaccatcaagcacgtggcctgtggggacttcttcactgcctgcctgactggtgagttgtcgggcctaccttgtgggacctgctctgaggccccacagagcaccttctctcttctcttgcaaaacacgcacttaatgaatgcttctgtctactagttatcgagttattgcttctgtctagtaactattgaggagatttccttatacaacctcctttaccctacggacaggcctggcaaggcagttattatattatcctcatttgacaagtggggacgctaaggctcagagagggtgtcacttgtccaaagtcacatatgtttgaagggactcatatccttttctctcttcctatcccatccttccagccctggtccccaactttattttgctgctgcaacccactggaggaccgggctatctggaaagactgtttaacttctttcccttctccttcctcactgcccttctccccagacagaggcatcatcatgacattcggcagcggcagcaatgggtgcctaggccatggcagcctcactgacatcagccaggtgggtgtcacatataccttgggaaggggaagtcgggggatggcggggagcccacatctgtgagttgacaccagattgggggcaggggagttcccagcaaccacaggttcctctagcttcccagctgcacctgctctgggccacctacatcggggaaagtacagaaaaaccaggcttccccaatggttgcccacctggcagtgtgtatggctggatttaaagacacagccacctcctgagaatgtgtagcctccagctttgtccctacagggggtgttgaagccagatggctccagaccctttgcccagtttctccttgcttcctctcctctctagcccaccattgtggaggctttgctgggctatgaaatggtgcaggtggcctgtggggcctctcacgtgctggccctgtccactgagcgagaactatttgcctggggccgtggagacagcggtaagctccagcctttaggccccatctcacagcatcctcagccatgacttgctccccttcatacccaccttccacctcacagcacattctctcttccctcttttctctcaaattctcttcattcattcaacaaacctttattttacaccgactatgtgcacaccctgtgctgggtgctgagatgagatggagatgtggcttccttcaggtgtttatgaggtaatgaaggaaatttcattcatccacctagttttttattttattttgagatggagtctcgctctgttacccaggctagagtgcagtggcgtgatctcagctcactgcaacctccaccaccgggttcaagcgaatctcctgcctcagcctcccaagtagctggcattacaggcacccgccaccgcgcccagcaaatttttgtatttttagtagagacagggtttcaccatcttggccaggctggtctcgaactcctgacctcgtgatccacatgcctcagcctcccaaagtgctgggattacaggcgtgagccaccacgcctggcccatccactaattttttttattgaggtcctctttgggtcaggcatcaggctggccactgaaactagagatgacactgatgggttcttgtcttcctggaggactcagtctagtgggagaaagatgacattgccagcatgccagagaacagatagcatcagggctacaccccagtgcagaggcgtggaattcagtgaacagtaatgtcaactggaggagagagatgtcatttgaacagggctttaaaggaggaggattttgagccggcgtggtggctcacgcctgtaatcccagcactttgggaggccgaggcaggtggatcacaaggtcaggagttcaagaccagcctggccaacatggtaaaaccccgtctctactaaaaataaaaaaattagctgggcatggtggtgcatgcctgtaatcccggctactcaggaggctgaggcaggagaatcgcttgaacccaggaggcagaggttgcagtgagtgaagatcatacccttgtactccagccttggcgacagagtgagactcagtctcgaaaaataaaaataaaaaataaagaaggaggattttaaccagcagaggggcctaggaaaggcatttgggactgagagaacagagaactcatgctgttccctcccctcagtgggccctcctcattcgggcatcacccccactaaagctcaaattaactccttctgggtttcttcttgtaggcagactggggctaggcaccagggagtcccacagctgcccccagcaggtgcccatgcccccaggacaggaagctcagcgagttgtatgtggtatcgattcctccatgatcctcactgtgcctggccaagccctagcctgtgggagcaacaggtgaatagatcatcaggatgactaacctgcccctggctctccttggctgcaagtgctccgtccatcattgcctacctttcaccaaagaccagaattgagggggttgagggtgctattggttcaacccagggtgggatctgtctcctggtgcaccagctcctgcccaaactgtctgtcagttggatttggcttctggctctgccctcaggttcaacaagctgggcctggaccacctctccctgggggaggagcctgtcccccaccagcaagtggaggaggccctgagcttcacactactaggctctgcacccctggaccaggagcctctgctgagtatagacctgggcactgctcactcagctgctgtgactggtgaggaggacttgggctctggaggtcagagggggactcacggtctccttggtaccctgttgaagcacccctttccttcctctcccccatagcctcgggtgattgctacacttttggcagcaatcagcacggacagttgggcaccaatactcgccgaggcagtcgggcaccctgtaaggtccaaggccttgagggcatcaagatggcaatggtagcctgtggggatgccttcactgtagctattggggcaggtgaggactgagcatggtgggggcagacagtgccatgagcagtggggggtgggggttgctattcagggccactggactctggagcctcccaggggccatcctggcaatgtgggaggggagatcctgctcgggctgtgcccacttcccacttccctcctggggattcttcctggcagagagcgaagtgtactcttggggcaaaggggcgcgaggtcgattgggaaggagggatgaggatgccggactccctcggccagtgcagttggatgagacacacccttacacggtgacttccgtgtcctgttgccatggaaacaccctcctggctgttcgatgtgagttgtaacttttcccacttcaccacacagcccagctggcccctgtccacactcccatccccagtgttcacagatggccacatcaccaaaagcatctttagcccccagataaaaaaagcagaagctgcggttgaaaagcttcaagcttcctgcctggggtggccaaggctggtgcttcttgggcctcatggaagggctgcctccactgctccccagggctcacatgcattctttctcctactgctgagtcccgttgatgctgaaactctctttctggcctaacagggtccagaatccagggcccagtgggagtgggaggtgggtgatgatttctggaggcactgccctcagaagctgcaagggtttctcttcggtaccctccagcggtcacagatgagccggtccccccctgaggcacccggattcacctctggaccaccctgatattgcttctcctctgaatgctctgaaaagtgcaggtgcccaaggcatgacttgcagctgtctcctggattgtgtcatcatggggtatcagggctggcaaaacccctgctctgcttttggccttggatatggaaacctcaaccactttgttctcctaccacctctttgcccttcctaccccttcctcccttcagtcagtgtccccagggtccagcctggctagagttagaaggcagacctagcctttggaagcagggtggcctccagagccttgccataaaaaggctgaaggcagccgggcgcagtggctcacgcctgtaatcccagcactttgggaggctgaggcgggcggatcacgaggtcaggagatcgagaccatcctggctaacgtggtgaaaccccatctctactaaaaatacaaaaaaattagctgggcgtggtggcacgcgcctgtagtcccagctgctcaggaggctgaggcaggagaatggcgtaaacccctccagcctgggcgacagaaccagactccgtctcaaaaaaaaaaaaaaaacaaaaaaggctgaaggcagctgtagctccacacagaccctaccctttcccctagcccagttagaaaataagtctgggccggcggcggtggctcacacctgcataggcagtgctttggccaggaggatcccttgatcccttgtggccaggagttgggagaccagcctggggaccatagcgagaccgctgtctccaccaaaaaaaaaaaaaaagaagaaaataaggctgggtgcggtggctcacgcctgtaattccagcactttgggaggccaaggcgggcggatcacttgaggtcagtagactgaggccagcctggccaacatggtgaaaccccgtctctactaaaaatacaaaaattaaccaggcatggtgacgggcgcctgtaatcccagctactctggaggctaaggcaagagaatcccttgaacccgggaggtgaagtttgcagtgagccgagatcgcaccactgcactccagcctggatgacagagcaagtctccctctcaaaaaaaaaaaaaaaaaaaaaaaaaaaaaagtatttggtgcttaccgggactctatctccatactttggagcagggcaagccagggcctgcctggactggccattaggcctgcctagcttctgcatagcccggggctgggcggtccccgggagtgctgccacctcccctacactttcatcctgaggcaggatttgctagacgtcggcttgcctctcttccccagcaggagggcaggagtcactaagtgctgcagaaaagatccgcgctggagattgcccgtcccccccatgcctttccccagaaacagttgagagaatgggtagctggtgggaccagaccggtttcccagaggacaggaaggccaataaaaatatcagctgcctgcctggagtgtggtgtcttcaagggtgggggtggcgaccaggcaccccaggactgggctgggcccgacctcggtggcagggctgcggccaagggaggaatgtgggcgcagccggaggctggggccgaggttcctctggcccagcgcccagtccagcctccccgccccagctgggctccccggagctggttgccaggcttcggctgcctagcacctggaagctggggccacggttcctgggctgctcacggccccggaggccgagctgttgcctctggagaagaaaacctttgtggcgcggcccgtccccttttccgacccgcacttccccggggcccgcgggctctggggagaagcggagccacgatctctgtcccccaggggaaagaaaagcccatgatcccgtgggtgggcgagactggcggtcaccagacccaaaaaccatgcactcgggggtgggcggggccgcgagggcgcgcattaggaccgcgcggccgcggtccgccctctcttccggagggcgggcttcacagccgagccctggccgcgaccgccagtcggcgccgcccggagccgggagcgccgctccagcgaggcgcgggctgtggggccgccgcgtgcctggccccgctcgcccgtgccggccgctcgcccgccatgcctggcttcgactacaagttcctggagaagcccaagcgacggctgctgtgcccactgtgcgggaagcccatgcgcgagcctgtgcaggtttccacctgcggccaccgtttctgcgatacctgcctgcaggagttcctcaggtgctggccggggagcaggggacagcgggggcggggcggggcggggggcgccgcctggggagggtctcgggcccggggcaaggcgggcctttgtctgcgctgcgaccctgtgacctcaggggcgccccgtgacgtcacggggagggatgacgtcaagccccgagggaggccccccccgcaggaatccgaggggtccgggcgggtcccaactgcccggcccggggcggaagacctcggcgccttctcgtggggtcaggaggggaagaggcccttccccgtcacctgagagccggcgcggcctcagccttgaactttgaatcctgggggaagaggacaaaacccgctcccgcgtggcagtttgagcctccggagctttcccccatctaacctcttctgattcttcgaacgttcagagaacggtagctattgttctcccatttcacagatcatgaaacgagattcaaagaaaggctgcgacttgcccagggtcacatagttacttaaaggcttaactaggatttaaacccggactgcttatgatcacacaatggaggaaggactgaatcctcccccgaagaaggacccctctaggcggctcccctctctcccgggggctggagtaaggcgggtggtccataagtcatgaagaagggggtcgcactcgtgttgttactgaactcccgctgccctctcaggacgcaggttagcccttggctcttgggcatccatcaagtttctgggcgccctgtatgtcttgaatctcctgctcacgcagggaacccctcaggcccgggtgtgggaagcagggtgaaggagccccgactcttcggaggtcatgcccccagagcgcaggggaaggccgagtcggccactgcctggctgtttgctgggacgaggggatcgagggcctggcagggatagtacctctgagacgcctgcctccggtgctccctcccgccgtgcctccctccctcgctcggtcctccgtagctcctactggcggaaatctcagcaggccctttgttttctgttccccacagcctgggccggctcctgccctcacatatgctccggcacaagctgcaggactgccccctccccctcggcagtgtacacatttactctcctacagacacagccccattgtctccgccactgctcttccccggccctctgggttccagatgaggccagctgagccccccgacccccccacagctgacccaccctgactgcctcgggaaaggagcgggggagggggccgtcaggccggattccttccaccaccttcttggcccccctctctgccactccccctcccggaaatcccctcttcctctcccactcccacaccccctccccccatcctgtcttcttccctgggccttggcctccactgcacagcctggagcagcctctgccctgcctgtcccccatcccccagtgcctgagctgtgctgctgaggcttctgaaggggagagaggtggttgggtggtccctgctcctcacccgccacggtacaagcacaagtgagggtgtccacagccctggctgggccccaagctgcaggctaagcttctgcctgaagcctagggacttgcctctgtcccctccctttctccaaaaccactcagtcagcacattcctgaagcagccaagtggaccccctccccctgggcccacccctctttccccactcctgcctgagctgttaggttggcccaggaaggctggttgccctgtgggcagacacaccccttcagtgcctgtggttgtattgtccttggcattgaagcatggccagtggtagtgggatcaaggggaggaggtgggtgctagaaatccttggggcagttggggcatggactgcctgggtcctggagagtgcctctagaactgggctcccatgtgggctctggttccgcctggatccctgcctgccttccacctacctgactcagacctgccaggaatgccctgccccagggccctgagtcctgctgggtgagccattgctctgcctgagccatgccaggcatgtgtgactggccctggctggggtcagcaagggcatgtcgacagaaagaagcatgccaacaggctccttgggtgctgacggccaggtagggtttggtgcaggagaaggcgggcagctagcaggaggggacggtcaccaggcttcagaagcccactgagcagtgcccagagtcttagctgtgcttgctggacatttttccttgccccagcttctcttccttgtgtgtgtggtgtagtagagcctgtctgagctgtggagtcagacacacatagccaggtgctgcttcacctgtaagcctcttcgtttcatctgtaaaatgggggcattccaccccttctcagaggcaggtggcaagggccgggtgggaatgtaaacaggtgccaaggagcatgcctttcctccccttttctgtgggagacacaccctcaaaggagcagggcagggtaaggtggccgcaagctgacctttgccctggttcttggcagaggaccttcctggggactgggcagccttcgcacttaatctcagcccatccctgttccccctcccagtcagctttcagcgcagccaatgaaaactaacctagggggagggggtgactgtgcagcgtgttcctttcccagtccagctgccatcctgggggagggggtgccagctgccacctgttggccaagtcctgactgaggcagctgtctgtgcctcctctaggcccagaccccccttcccaggacaggggctggggtcttctgggatcctggggaagtagagcccctcaggcctctgcttgcccttttgtctcatctaggctggttgggaaccggtctggtgaggaagggaggctgcctcagtggagggggtggggccaggcctccctttcccctaatgagaaacctttttcctgcccctcccccatttcagtgaaggagtcttcaagtgccctgaggaccagcttcctctggactatgccaaggtgagtccacactgccaggaagaagcccaagcacagtctgttgcccttggaggccggagctgctggcagccagtgggctcagggccagtgtcaaccaaaagccttgggatggtgcgcctccacaaaggtagcctgttccctcccaccaggccagtttgcaaacgaggcccctgtttgccctggagggcatgcacaatgcccagcctgtaggggtgcacagagctgctctgtgcccgcaagaagtgttccctccccttccggtggcaagccagacctgtggctgagggccagtatccctccaccaggggaaaggaagcagagccccagggacagcctgggattgagcaggctgattggctgcctcttcaaaggaagcgtcctgtgcaggcatgttaggacccagcatcagagcagatgctgcctgctgtgcccttcatccctggactcaagaggggcaaagagcccaagagaggctattacaggctccaaggtagagccagcccagttgggtctaggggtgggaactgggcactgcagtcagctctgaccctggccagttcccccatccctacccccagatctacccagacccggagctggaagtacaagtattgggcctgcctatccgctgcatccacagtgaggagggctgccgctggagtgggccactacgtcatctacaggtgaggctctgatgtgagggctggcaccacctctcccttggcaggcactaattgcagccttcccaccagggccacctgaatacctgcagcttcaatgtcattccctgccctaatcgctgccccatgaagctgagccgccgtgatctacctgcacacttgcagcatgactgccccaagcggcgcctcaagtgcgagttttgtggctgtgacttcagtggggaggcctatgaggtgggtggggtctggctgaatgtggaggagggggtacctgatggcctaggcatctcttaactcagcacctctgacatttccagagccatgagggtatgtgcccccaggagagtgtctactgtgagaataagtgtggtgcccgcatgatgcggcggctgctggcccagcatgccacctctgagtgccccaagcgcactcagccctgcacctactgcactaaggagttcgtctttgacaccatccaggtgaggccttccctgaactgtgggttgcagggtaggtgacaggtagtcaggatattgactcctgcctctctacttctgtggccccagagccaccagtaccagtgcccaaggctgcctgttgcctgccccaaccaatgtggtgtgggcactgtggctcgggaggacctgccaggccatctgaaggacagctgtaacaccgccctggtgctctgcccattcaaagactccggctgcaagcacagggtgagatgccccttttcctgtcagcccccttttgcccttgaagccctagacagaggctcagcttctgatgtacttaggccttggtggtccctgctgtgctgctctgaaaccctcagtccttccctctgctgccagctccagcctcttcctaacaccctctgtcttcctcacgtagagctgggtgcctgctaccctgtacccactcctctcctctccctggacctccccctactgataactctcctcccttcccccatggcctggggctttgccaacagtgccctaagctggcaatggcacggcatgtggaggagagtgtgaagccacatctggccatgatgtgtgccctggtgagccggcaacggcaggagctgcaggagcttcggcgagagctggaggagctatcagtgggcagtgatggcgtgctcatctggaagattggcagctatggacggcggctacaggaggccaaggccaagcccaaccttgagtgcttcagcccagccttctacacacataagtatggttacaagctgcaggtgtctgcattcctcaatggcaatggcagtggtgagggcacacacctctcactgtacattcgtgtgctgcctggtgcctttgacaatctccttgagtggccctttgcccgccgtgtcaccttctccctgctggatcagagcgaccctgggctggctaaaccacagcacgtcactgagaccttccaccccgacccaaactggaagaatttccagaagccaggcacgtggcggggctccctggatgagagttctctgggctttggttatcccaagttcatctcccaccaggacattcgaaagcgaaactatgtgcgggatgatgcagtcttcatccgtgctgctgttgaactgccccggaagatcctcagctgagtgcaggtggggttcgaggggaaaggacgatggggcatgacctcagtcaggcactggctgaacttggagagggggccggacccccgtcagctgcttctgctgcctaggttctgttaccccatcctccctcccccagccaccaccctcaggtgcctccaattggtgcttcagccctggcccctgtggggaacaggtcttggggtcatgaagggctggaaacaagtgaccccagggcctgtctcccttcttgggtagggcagacatgccttggtgccggtcacactctacacggactgaggtgcctgctcaggtgctatgtcccaagagccataagggggtgggaattggggagggagaaagggtagttcaaagagtctgtcttgagatctgattttttccccctttacctagctgtgccccctctggttatttatttccttagtgccaggagggcacagcaggggagccctgatttttaataaatccggaattgtatttattaatttgcttccagcctgacttacctgggttggttaggtccctgggaggctcaaccaaactgaaggcaaagaaaggaccagtcagagaagggccgctgcctgggtctggccccaggatccagcttacctgctggctcgccctctgatggacgccgggaaaactgcatcgggctttgtgtggaagacggtccctgccactgccctctgccgatgaaatgcgggaagtgtatggcctagatgtttcataaggctggagtccctggtcagccccaccagattagtgcttctaccctaggcagggctttcttggtctaatggtaataagcaccgacactgctaagcactttacgtgcattattatttcattgaaaagaactgtcaagtgaaatactttttagcacagtaactggctttgtgggctctagagaagagttaatgaggcagtgcatgttcttggcccagagtaagtgcttagtgaatgctttctaactccgaaccccagccacatccagggactgggtgttgagcaaaaggggccttcaagatgttcaaggcacttggattttctcctgtctctcatcggcttttcttaacgggcctcagtgggtgcatgtgattatccacgtttcacctatgaaacatgaacagaggagactgacttatcagtgattcttccgcgggttcggacagggcctcgattctgttttaaactccagtagtccctagaaattgtagctccctctagttgtggcaataggtgtgggtccttgtgcttgcttttggcaagtttctgagctacacagggcctccattaccgtcactggtgaaatgcggctcacctcccagatttgttgtaaagattaaatgaactggtcagcacacagtgccttactgtcttgcctagccctgagaagaggctgtatgtacgagaatcattagtaagggaaggttcaaggactgtagttctttcttttcccatgcagaggctgagggtttaaacaaaaaaaaaaaaaactcagcctctgctgcacacgactagctactcaggaggctgaggtgggaggatggcttgagcccaggaggcagaggttaaagtgagcagagattgcgctactgcactccagcctgtgtggcagagccagaccctgtctcaaaaaaaaaggccttgggctgggcgaagtggctcactcacacctgtaatcccagcattttgggaggttgaggtggacggatcacgaggtcaggagatcaagaccatcctggctaacatggtgaaaccccgtctctactaaaaatacaaaaaaaaattagctggtgtggtgacacgcacctgtagtcccaactactcagaaggctgaggcaggagaatcacttgaacccgggaggcggaggttgcagtgagccaagatcgcgtcattgcactccggcctggcgacagggagaataaaaaaaaaaaaaaccctttatggggtgacaggacaggactaagcctcagtgagccaggctggggaggtcatcatcggcccaatctttcttttcaaaaaggtcaaattgacttacttatctagggagaaatggggccctcctgcctaggtgagaaactagagctgggcttcttcaccagataaaccgtcttggtacggtgatgcctggagactggtagaggcaaccatgggctccagcagcataaatgctttcaggcaacaggctgaaacacctttccagaatcccagctacacacctgaccgagcacagtggctgatgcctataatcccagcactttgggagcctgagttggagatgaccctgggcaacaaagggagccaccccgtatctacaaaaaaatataaggagccgggcacagtggctcacacctgtaatcgcaacactttgggaggctaaggagggcggattacctgaggtcaggagttcaacaccagcctggccaacatggtgaaacaaaagtctctactaaaaatacaaaaattagctgggcgtggtggcaggtgcctataatcacacctacttgggaggctgagacaggagtattgcttgaacctgggaggtagagtctgcagtgagctgagatcgcaccactgcactccagcctgggcaacaatgagcaaaactccatctcaaaaaaaaaaaaaaaaaattagttgggcatggtggtgcacacctgtagtcccagctacttgggaggcccaggcagaagaatcacttgaacctgggaggtggaggttgcagtgagctgaactccagcctgggaaacatagtgagactccgtctctaaataaataaatacactgtcactgcatgcttccgggggtcacattcacatagtctagatggtgcctcctagagttgcatgcaaacaatggggctgttaaccccatactctgcaagccttgcacacctggaccttattcagtgctagtcataacttgcagaattcaggccatgttctgcaataaaagtgtgagctgcactccccaaggatctacctcagcccaggaatcattcactctggaggaagcgctgtactttactaatgtctagctccgcttttgggccgactgcagatcttatctgacacaggcagaagacagcttcctttcacaggggtggcatgaggcataaaggagtcaaaacactttcacaaaagaacaccctcggccaggcacagtggctcacgcctgtaatcccagcactttgggaggttgaggcgagcggatcacaagatcaggagttcaagaccagcctgaccaacatggcgaaaccccgtctctactaaaaatacaaaaattacctgggcatggtggcgcacacctgtagtcccagcttctcatggggctgaggcaggagaatcacttgaacccgggaggtggaggttgcagtgagctaagatcgtgccactgcccgcctgaacgacagagcaagagactatctcaaggaaaaaaaagcacccccatcctggctaacatggtgaaaccccatctctactaaaaatacaaaaattagccaggcatggcggcgggcgcctgtagtcccagctactcaggaggctgaggcaggagaatggtgtgaacccaggaggtggagcctgcagtgagcctagattgcgccactgcactccagcctgggcgacagagtgagactccgtctgaaaaaaaataaaaaaacaaaagcaccctacagaaaagggtgtgctcaagaaagaaggctggtgctttagctccgtcagcattcaggaagccacctgcggactcttgccgccaagggtctgattctaccctccctgaatcccccatcttgtggaatctatatgtgtatatatataatctatatatatattatataattatatatatagatattatatgtatacatatagatattataattatatatatatatacacacatatatatataatcttttttttgagacagagtctcactctttttgcccaggctggagtgcagtggcacgatttcagctcaccgcaacctctgcctcccgggttcacaagcgattctcctgcctcagcctcccgagtagctgggattacaggcccctgccaccatgcctggctaatttttgtatctttagtagagacgggatttcaccatgttggccaggctggtctcaaactcctgaccttaggtgatctggctggccttcacttcccaaagtgctgggattacagaggtgagccactgtgccaagcctcaattttcttttctcttttttttttttacggagttttttctcgtcatccaggctggagtgcagtggcgcgatcttggctcactgcaacctctgcctcccaggttcaagtgattctcgtgcctcagcctcctgagtagctgggactacaggcgcccgctgccatgcctggctaatttttgtatttttagtagagacgggttttcaccatgttggccaggctggtctcgaactcctgaccttaggtgatccagctggcctcagcctcccaaagtgctgggattacaggtgtgagccaccacacccggcctcagttttctttttttaaaaaaatagttttttcatttagagatgggggtctcactcctgtcacccagatactggcactgcagccgtaaactctcgggcttgaggaatcctaccacttcagcctcccaagcagctgggactacaggtatgtgccatcacacccaacttttgtttttttttttttttttttttgagactgagtttcactcgttgcccaggctggagtgcaatggcgcgatctcggctcaccacaacctccgcctccgaggttcaagcaactctcctgcctcagcctcccgagtagctgggattacaggcatgcgccaccatgcccagctaattttgtatttttaatagagacaaggtttctccatgttggtcaggccggtcttgaactcccgacctcaggtgatccgcctgcctcggcctcccaaagtgctgggattacaggcgtgagccactgtacccggactacacacccaactttttacaatttttgaagacacagggtctcacccctgggcacaagcaatccacttcagccacccagagctaggattacaggcatgagccaccgcacccagccagaatcaacttttccttccattacatcttagctcaaacccaagctcaacagaagaggagggtaacttaattcattttttttttttttttcctgagacgggagtctcactgtcgcccaggctggagtgcagtggcataatctcggctcactgcaacctccgcctcccaggttcaagcgattctcctgtctcaccctcctgagtagctggaattacaggcgcgtggtaccacgcccagctaatttttgtattgttagtagagactgggtttccccgtgtttgtcaggttggtcttgaactcctgacctcagatgatccacctgctttggcctcccaaagtgctgggattacaggcatgagccactgtgcctggctgcaatcacttagtgttttttttttttcctctgcagacaaaaaaataaagttatccaaaattcaacataagaaaactgtaatcaccaagaggagccagttacattgcagataacagtgcctatcaccttcacctctgtcagaggccctcagaatttccaaagtgttggaagtggaagaaggcaggtttgaagttttaggttgggttattagcaaaccagatccccatttcttggctgggcatggtggttcacgcctgtaatctcagcactttgggaggccgaggcaggtgtatcacttgaggtcgggagttcgagaccagcctggccaacatggtgaaaccccatctctactaataatacaaaaaattagctgagcgtggtggcaggcacctgtaatcccagctactcaggaggctgagacaggagaatcctttgaacctgggaagtggaggttgcagtgagccgagatcgtgccactggactccagcctgggcgacagagcaagacttcgcctcaaacaaaacaaaacaaccagatcgccatttctcaatgacttatggcccttggaatgcaagtggcaggaccttttgggcctccagtgagggacagcaaaccacacttatcctcaaacttcacagtaagcccacagcagccctgcccagggagagggcctgtcagccgggtaccctgtgtccagggtttcattgaagaactgtctacaatcaccatagcacctggccttaaataatggatttggagacggcttctgggtgggatgcatattacaggggtaccccttttaaaaattaggaattactcctatgaagtgaggtatgttagaaactgttaagaaaaagttacctcaaacattcacagcactaaacgaatagaacaaggtcagaaagcgaggttttcttatttttactggtttataataatcttaaaaaccccatcacacccataaaccaccacaggtgaggtgagagagatggagaatgaatgctacagtatgtggatagaatggggaatccaggtattccctagggtagtgtaggatggagacagggagtgtggagaggaggccctggcttggacccttattgctggctgggggttggctggcagaggggagagggactcaggctgaactccgaaagaaggaacatctcacaccaaaggcgagggcagttgggggcagggggatcacagtacattttccatgcagactaagggtgggagtgagagcttcagaggcttgcacccctacacaggaagagatgggtttgaggttgtttgacttaaagcccccaagttggtgtctggtccagtttcctaaaatagcagctcacctttcagggagaggtattggggaggaaaaaaaaatacagcaagaatatctgctttggagatcaagcaaggggtagggggaagacagtggtgctctttaaatctgactcagaaaagcaggaactggaagagggccctgggtgagatggcggccaacaccttcggagaaggcattgagtcagaagctacaggtgctcctgggggatcaggacagggaggtaccagtgttcacagacggcaggaaaacaattgggaacaataaattaggacttcatgttgctatcatttggcataacacaatcaggcttttttttttttctttttccttttaaatataaggcaacttgccaacacataacttaaaactggtcttcagtcacattgcttcagatcactagagaatttctggctaacgaacagtagtggatagtgaacaaaatgcaaaaccttaaataagaaccatcagctgacattccccagagacaagaggaaaggtaagggcttatttcatctgtaaaaaataaaaaagcccaattctgcatctttaacagaatggtgcaaaaatttgtaacaaaacagtctaagtttaaaattacagaaaagtgtttctagccaactaattgtcgcttgggatgagacgtgctgagcatggagtggatgaaggtatgctctaagaatggacagagggcaggaggggcttgtttccaatgtaggcccagctccaggtgttagaaccatgctcatttggtaaaggaagtactcaaagagcttaaggctttgtgtttgtttttttttccttcattaaactgaggggctgcactagagggtgaatgtacctgtggggccactcacacacaatgctactcaaacccacactacattcatacagaaacgtaacgtttaaaacttacagtgtagagcaatattcttagccagtgtagagagaaccaaatgcatttttttttttttggtgtttttaatcccaaactccaatgtgatcattccttacctacctaattcctcaagtaaggtagattttgtttttgttgagggggaaaggataggggctgtggggaggtgagttaggggacaggcaacagtgagaaagggatcttgggtatgctcaaaggtcactgtatttttctaggtttggaaaggggagtctggaaccaagatgccaatacaaagactttttccccccatatctcaagaaatggtcaaatacttccaagatgcccttgagatcaagtgtggcaagggcaagtgcagtggctgtgggatcaatatagacacaaaacaaagccttgaggaatggaaaggaacttgaaggatatgaagactgggtcagctttgatttgagatccttcgatgagtaagtaattagctttcagagcacctgggaaatcttgcttcttagtcctggagggaggggaaggggggtagcaacaggtagaggtctggattaggggcctgagcacctatactacctcaactagggcattccgtcagcccacacctcagtcgtcctaagggaaacaggaagagattcaagaaaagatgggtgggagctggctggaaatggccaaggtggagagactagctgacaggcagtcagtggagagaaaagcctgggcttagggttaggttctaacataaaaccaaaagttgctggaggggaggacgagaggaccccttctgtccccacttagatcccaccaaattccctttcttagacatctaagaatgatcacactggagcagtgaaactttgaaactatccagttacttaaaagactaaacctaggagggtgatgtatgatgtgttgcacgtggagggcagcagggctacctatctataccctgggtgctgaatatgaagacttcgactctctgtgggatcgggggctcggttgccaggggctcggtgggccttgctcagcatggccaggctctgttctcggaagcaggcctgttggaaatccccacttaggtaatccactgtttgcatcaagctgttctggcttgccactggaccgcccccggtccctgctcggtagtgggccccgggagctgccgcacagtcgaggggtgcacctgtgggctgcccaccgtggaacggcatggcaaggtcctgagaccccgagctgtcgctattgggagtgggcagaatgttgttccacaggggttggaagtagtgaccattggggtaggccaatggggctgccatgccgttgactggtggggatggggtcggcttttccaggggtggcttcagatggaaggactgcgccaggcagagttcctgcgggtaggcaggggccttgcccacaaagccaggccctgccaactcgcgtcctgccgcatgcttgcctgtcaggccaggggctggcgtcccactagcctcgctgcacatctgctgtaggtgggccagctggtgctggttccaggtgactggcttgaggtcgctagggtagccagtggggacgcgagagatgcctgtgggcaggttgacaggacctgcagcaggcaacgcggcggtggccgcgtgggtgtgctccatgggattgaccacacatgaaggcattggtgtggggacgctgtgggtcgacacccgggtgcttgcattgatgagcagactgcgactaatggggctggggttggcgatctggccctcacacactgaggtagtgctgatgcctgccctcgtctggcaaaactggttgatctggtgcacgatgctactcaggtccggaggctggctgtgctgcagagtggccgccattgaaagggggatagttgaggtagacacggtcacattcgggggggcatctgagtctggcatcttccggcctccatgcagcaagggattgtgggggtgctggagaccctggtgagccagggcctgagggtggaccaagccctgggtttgggccatgggctgagggtggcccaggccctgaggctgctggaggctctgagggtgggacagtgcctggggtggcgggataccctgagggtgctgcagcgtctggggaggggcatgggccagggtctgtgcatgctgcagggcctgctggcgggccagagcctgggcctgggggtgggctaaagtgctgggtgccacagtagcatagggtgccactggggggttcatgatggcctcagggagcaaccgggctcgggtgccgtcaaagtccttgagtatgcttttggctggcactttgacaatggcaagcaggcctgccttggtggcagcctgtgtcgggtaggggctgtagcgctgggctgatgtgtcgaggccgttcacagtacgacgaacgtgtttccgctggggaaccttcacactgttggggaagatttttatagtcagtgggttgtttgcgaccttcttagcatacgcatccaattcggctggggtaggatagtgagcagttctcattttctgtgtagtgtcccctagagagagagaatgggaaggagagcaaagagggagagggagctcatcagtgccaaggcaaacagcccttccagattccccttttgagggcctggggtggggtggggaaatgactagattgtcatctgtagccttcattcgagacccagcttcagtcttcacattaacaagcactgctaatgttcagtaagtgcttatagtgggccaggccttctgccagatgacaggccatctcaatgaatcctcactattgctgtagaagcaggcactatcatcatttacattttataaatgaggtaagtagagatcagaacagcaaagcatctttcaaagtctcatatcttgcagaaccagaatttggccaattctcagagaggtaaccgagagttctccccctacacagaaattcagggtcgctgggcacggtggctcacacttgtaaatcccagcattttgggaggccaaggtgggtggatcatctgaggtcaggagttcaagaccagcctgggcaacatggcgaaaccccgtctctactaaaaatacaaaaagttagccaggcgtgatggcaagcacctgtaatcccagctacttgggaggctgaggcaggaggattaattgcttgaacccaggaggcggaggttgcagtgagccgacatcgcaccactgcactccaacctgggcgacagagcaagactctgtctcagaaaaagaaaaaaaaaaaagagagaaatgcagggtctggaactctaccagcccatgtggcttgggggtaggttctaagcaaagctccttgtcagggccatggtggcccttcagtctagagggtacccagagctacgactcttcagtctgcagggaccaatgagggatcagctttcccttgcatcttggcagctggggggctttgcccactgggtgggcaccctgaacagtagacagaatgcttcctttcaggagcagaggaataagctgccaacatctctccccttccccatgtcacaagttcacttttgtttacagtttactctatgcccgactggatgaggatcaaaggctttatttatttgcttgagaaggaagataataatgacagggcagcagggagggaattgagaagaaaggattcagagcatctttcagtcctttcagtcctgagagccaaaaatagtctgtatttggtccatgtcagctgtcattttccaaaaagaaagaggaaaaacctgcctgcctttggagactgcggaaatgcccactcggtgtgcctcattaatgttaacagtctctttgttcccatctcctgttgcctcccatcagggggctcagcggatgtccggcttccagtcaaaaaggaaaaggttctgagaacaagggctctttaaggatgccaacctcctgcaagggggctctgctctactctctcgtctctgagggagggtctcccctgagtatacacaaaaggtgcctaataaatgcttgctgaatgagtacacagactgcccaaagcagaagtggcttggcaggaagcccaggctcagctagccgactctctccttacttcctcctcttgcaaaaggcaggaggataggccaacgactaatctgactgaatgcccagcttgtggcctcaggtggccttggcccaaaggagactctattcaaagtcacatcactgggcatcacctagaacaaaggtaggctaatgagcatattagaaggaaaatgggtacagctctctttgtttggtgataatgctggttagcaactcctgctctgggaagcaggaaaagaaagctcaagtcaggaggggcagagagatttgggcccatgctcacaagcagatctgggcaaaaagagccaggcatccccacctcccaaaacaggtctgtgctttcaaatactggcaaaaaagtctgggatcactgattgagagcaagtccctaaactcaagacatcagaattccaacagaagctgccttggtcaaccactgtacctatgtgtcttattggtcataatctcatataatactcctagcacagtgctttaaacctagcccacctccatgctggtgggcttctctccttgaaatccaagtagaagtcgtatagtaccttgatgagtagaagagtccctttgttccaagttagtaccaactctgaggttttttttagcagaggcaagggggaagcttgacctcattcaggagtatggaaggggacacttatccacattgattagttttctttgtcctgcctccactgatgctgaaatggtgaagagggctgtcaaaggattcagaaataaagtgaaatgagggtagggagggtggccacaaggctacagtagctttgttaaggaagaaccccaaagatgagtacagtatattgaacaaaaaaggggtatcattctgggaatacagcaccatctacctcacataccagacttaagcctaactcttaaaaaaagttttctgctgggcgcagtggctcatgcctgtaatcctggcactttgggaggccgaggcgggtggatcatgaggtcaggagttcaagaccagcctgcccagcatggtgaaaccctgtctctactaaaaatacaaaaaattagcctgggatggtggagcgcacttgtagtcccagctacttgggaggctgaggcaggagaattgcttgaacccggcaggtggaggttgcagtgagcaaagattgcaccactgcactccagcctgggtgacagagcgagactccatctcaaaaaaaaaaaaaaaaaaaaaagttttctcagctgggcatggtggctcacgcctgtaatcccagcactttgggaggccgaggtgggtggatcacgaggtcaggagttcaagaccagcctggccaagatggagaaaccccgtctctactaaaaaaatacaaaaaattagccgggcatggtggcaggtgcctgtaatcccagctactcgggaggctgaggcaaagaattgcttaaacccgggaggcagggttgcagtgagccaagatcgcaccactgcactccaacctgggtgacagagtaagactccgtctcaaaaaaaaaaaaaaaagttttctcaacacttatcacagcccccacacaggcaccctgactacttattttcttctgtaatgtatttctgtaactacacagccaacacagataccacagctttgtaagcgacttacttaaatagcttataccaatagtgtcattaatagagacatagacaatgtagggaataggaaatctgtagtttgtaaagggttagagaaacctgtattcaagtactagcttcatcatttgcccatactgagagcctgtcattcctcaattatcaacagggatgaattctgctctcctacttcacagaattactaagatcgagagtcaatgaacattttcactaaatgagcattttcattgaaaatgaaacaatgatggtcaatagttaccattcaaggatagcagatgtggctgagtctgaccacagacaacacaaagaaaactgactaaggaagccccaactgcaggacaacctggccttcagcctgagagttaaatgtaacagaaagcactgctgtctattccaggatggactggaggcaattttctgcctgaaattcagtcctcccaatggagacctctctgttcatccttctgttttgaaggtcagagggcacaggtggcataggcaacaggaacctctatctgtaggcagagaggcacaggcaatgtgttcaaacacagatttcagagtctgagctgagtatgggccagtcacaggactgtcatgtggcactggcaagtgacaaaccctctctctataccttatccttctgacaaaggcaagagagtcttccatatggaatttttgaggaatgggtgacaacatatgtgaaaatattcaatatagtgcctggcacatggtagcaacttgacaaatgttagctattatttctatgactttatccagtcattgggtcaatctgccatttccagacccctccactagggggcagatatgcacataaagaagcagtaaaagaaggtaattttggcatttgtccccagagccccagtgttctgccatggaaggaaatcaaagttgttatctgaagatggtttaaggaccaaggaccttttatcagctattcaaacagtaaatatttacagagccactactatattgtgatcctgagaaggggaaatacagagcagaggtttaggattaagaaagaaaaaatttccagtggcgcatgcctgtaatctgagctactcgagagactaaggcaggagcactgcttaaacccgggagatggaggttgcagtgaaccgagattgcgccactgcactccagtctgggtgacagagggagactccatctcaaaaaaaaaaaaaaaaaaaaaaagggccgggcatggtggctcatgcctgtaatcccactactcaggagactgaggcgggagaatcacttgaacttgggaggcggaggttgcagtgagccgagatcgtgccactgcactccagcctgggtgacaagagcaaaagtcctcctcaaaataataaaataaaataaagtgggctgggtgtggtggctcacacctgtaatcccagcactttgagaggccgaggcaggcggatcacctgaagtcgggagttcgagaccagcctgaccaacatgaagaaaccctgtctctactgaaaatacaaaattagctgggcgtggtggtgcatgcctgtaatctcagctactcaagaggctgaggtagagaatcgcttgaacccagaaggcggaggttgcgttgagccgagatcacgccattgcactccagcctagcaacaagagcaaaactctatctaaaaaaaataattaaaaaaaaaataaaaataataaaagtgaacaccaagataaagctgccaatttgcccgtcctccaaatggcttttcccttgatatcacatctttgggtaaagctgtcagagtgtgttaaggaacccagaacaaaggaagcttctctttgtcatcttactgcatgcctctaagtacgttccctctccagttgtgtccccagaagcccagaaataggcacgatgcagttaggatgctgatttggatgaccagagagtataacataacaccttcatcacccaatcatcacttattaagataaaggatgggttgagaaagctatagcagagcttgccttattgtgtcaggcaactgtagaaggaggactaccaccttcagctgttattacatagagctggattcactggccaaattccagaactagccaggctctgagtcttacgctctctcaaagaaatgaagtctaaaggctggaccatttttaacttctgatgatgttctcacatggcaggggctggcaaacgacagcctgcgtgcctggtccagttgctgtttttttgtaaaaaagtttcactggaacacagacaccctcatttgtttattgtctgtggctgccgttgccctacaatgccagagttgagtagatgcaacagagaccacatggcccacaaagcttaaattattggctatctgggctttacagaaagtttgttaacccctgtcataaggggttcagttaaggtgctgaagcacctttcctatcaaagggaagcctagccacctcaatgatttcccctttgtgctctgaatggaaggtctattccaaatttagggctgtttttacacctgaagatactatacatggtaatgtgccaagaatagaatattttccttgcagatcatgtattacagggagagaaggtaggaaggagtccgggaaaatatgaagtataaaaccccaattccagaaagttaagacaagaatctaacagttttcaaaggctcaatcttctgggaagtgtattagcaggaaaatgcccagagagactgagaaagctagctctccatctcttctgagggcaaaagctccctgacttcctgtgaactaaagtcacactgactcagaaggcaggtagcaaagccaaagggaactgtctgtttccatggtagactactaagagagttcaaaacaagagaacagcatagtttatttcagagatatagtaagtaatctggactgtgagttttcattcaattccctatgaaggttcaaactgaaacaccttttttaagggtgatatatatatatatatttcccctgaagctctttatagttttgttgttcaacagaaagctatcagcaacaattaaaattgagatacaatggggaattacagaatttaagcagacccctaatggctggacacagtggctcacacctgtaatcccagcactttgggaggccaagttaggggcatcacctgagatcaggagtttgagaccagcctggccaacatggtgaaaccctatctctactaaaaatagaaaattagccaggcatggtggtgggcacctgtaatcccagctactcgggaggctgaagcaagagaattgcttaacccgggagggagaggttgcagtgagccaatcaagatcgcgtcattgcactccagcctgggtgacaagagcaagacttcgtcttaaaaaaaaaaaaaaaagaaaggtgtcaaaattcaaggtcagtgtaccccagatgtgcttcaaggacggcccaaatgtagagacaaaaacaaagaatcacacatgctccataggatccagattacttacatttctgaagtccagtgttcatctgcgtgtgagaaagaagctgaaaggacaggtcacctggccctggtagacaggctagcatggcagattggcatcaacacaacatggggcagtggctcacactgtaatgaacaaaaacaaggtcatgaaacacaaggcaactcattcgaagaagagagtaggaacactggatatgactggcgtgaggcccaagtttagacacataaagcaatttaattagcagtgtgttggttgaaagtatacttacatctttatctgtgacgacaatttgctgtcaaatatcactatggttaaaatgatttttcagttaccacagatgtatggatgggagaaataaaactggaaagcacctattcatacaactggaaagtacaggtgcatttataatgtctcagtattcctgaggagagtgggccctcatagggcctggctcagccagcccatttataggcctggttggagaccagccagacattttcagaagcagcacattatatgattgcaaaggtacccaatgtctgacttgtgagccagtaatatgaacccacttttattttattttttttgagacggagtttcactcttgttgcccaggctggagtgccatggtgcgatcttggctcactgcaacctctgcctcccaggttcaagcgattctcctgcttcagcctcccgagtagctgggattaaaggcacccgccaccacgcctggctaatttctttgtatttttagtagagacggggtttcaccatgttggccaggctggtctcgaactcctgacctcagttgatccgcccacctcggcctcccaaagtgccgggattacaggtgtgagccactgcacccggccatgaacttacatttatttacttatttatttatttatttaagacagagttctgctgtcacctaggctggagtgcagtggtacaattttggctcactgcaacccttgactcctgagttcaagcgattctcgtccctcagcctctctagcagctgggattacaggcgcatgccgccatgcccagccaatttttgtacttttagtagagatggggtttcaccatgttggtcaggctggtctcaaactcctgacctcaggtggtccgcccgcctcagcttcccaaagtgctgtgattacagtcatgagccaccgcacccggccgaactcacttttaaatggaaggaggaaagcatcctaggaggcacaattaaccactgttaaagcaaattctgtttgcaaatttctggggcttcacccttcctgacatgcaattagacctcctgaactacctctcccaccccctcaaaagaaatgcattgctcccagactaaagcaaggagaaaggctgccagcagctctcttcgtgcaggcaatcctgacatgtcaagaccgcacgagtttcattagtgatgtttaccaaccagacatacacagcccaagcaagcagacattgatggggccttctgtagcgaaagaagccctgtcaacaatgcaagctccttaggtaacagaaatacgattttcctaaataagtacacgaacttcttttcccatatttcagaaaccaaggtggcaaattatggctttagatcacagcaaaaaaggagtgggggaaaagctcaaaagttaaagacgacaaaaatctccttattttcttgagagggctctctcaggtatattaaactaccttgtcatgatgagtatcagagggctcctgcttccaagaccaggtagctgaaaagacactttgtaaaagaggctgctcaaactgtgtctaagatagcaactgcagaaagaactgaagattgaatgccttaatgagaacagagctgtccaagagttctggcacagcgtcagtctttttaagatctctggtgggtgggaaaacagaatgaacacagtgagccaacttcagtgcctcaagaaaaaaaaaaagtcttggccgggcacggtggctcacacctgtaatcccagcactttgggaggccgaggcgggcagattacctgaggtcaggagttcgagaacagcgtggccaacgtggtgaaaccctgtctctactaaaaatacaaaattagctgggcatggtggcgcatgcctgtagtcccagctactcaggaggctgaggcaggagaactgcttgaacccagaaggcagaggttgcagtgagcagaggctgcgccactgcactccagcccgggccacaagagtaaaactctgtctcaaaaaaaaaaaaaaaaaaaaaaaagagagacttctgttggggtctggatgctgatctttacataataacttctcccttaagaccctaacacagctgaaggcaaactccaaggaaaggaagagaattaacaagtactgggagctaaaactgtgaaatgggctgtatgaggggctttagtgatgttttcttaattgagtctctcaagccttggaaacaggtaacaaacttcacctgtcatctcatcatctctagatgggattactattagccttctaaatggtctgttccacgcttaccctttatcacccaatctattctctattcagcaatgttagttctttttttttttttttttttttttgagatggagtcttgctctgttccccagcctggagtgcagtggtgcgatctcggttcactgcaacctccgctcccgggttcacgccattctcctgcctcagcctcccgagtagctgggactacaggcgcctgccaccatgcccggataatttttttttgtatttttagtagagatggggtttcacagtgttagccaggatggtctcaatctcctgacctcatgatccgcccgcctcggcctcccaaagtgctgggattacaggcgtaagccaccgtgcctggcccaaacggggtttcaccccatgttggccaggatggtctcgatctcttgacctcgtgttccgcccgccttggcctcccaaagtgctgggattacagacgtgagccaccgcgcccggccaattctgttaactgaaagtcagagcagcttaaatatctctaatgactttccatctaagaataaaatacaaaatcctaacatggaccccaaggccctccatgatctattactactggttctctgacctcaccttctgacctaccctgccctctcttgctgacttacttccagccaccatggtctcaccatggtttccctgcagttccttcaacgagccaaacacgctaccgctttaggactttgtccttaccattccctctgcctggaatgttcttgccccagatgtctacttatttttctagctccctcacttcattcaggtttctgcttaaatgtcacttcttaaggggagggcttctttgacctccatgtctaaaacagtatccttatttccctcatttttttcttttaaaatctatcctgagaccctgaactcaacaattcctcccacacaattaaccccaggcacgtggcccttcctgttgttaactcctctatttccctcactttttaccaccatcattaccacctgttttacgtccatctctctccaccccactaggatataaactcagtaagaacagacccttggttcgttttgttcattattatatctagaaaagcatcatctactaacacttacgaggctctccataagtaactgttgaccatataaaaggcagattgttattaattttttgaggttgtcatttaatctacatatgtcaatctattaatgatggcagagcccaggactgaaacctagatttgacttttcccaaagcctgtggctcactcttcaactccaggttctatcagtttcctttttcttcagacagcctatcagccaggctggagtgcagcagtgccatcttggctcactgcaacctccacctcccacgttcaagcgattctcctgcctcagcctcccaagcagctgggattacaggtatgcaccaccatgcccagctaatatttttttttttttttttgagacagagtcttgctctctcacccaggctggagtgcggtggcgccttctcggcggctacaatgctccgcctcctgggttcccgccattctcctgcctcagcctccagagtagctgggactacaggcgcccgccatcatgcccggctaattttttgtatttttagtagagacagggtttcactgtgttagccaggatggtcatgatctcctgaccccgtgatctgcccgcctcagcctcccaaagtgctgggattacggcgtgaaccacagtgttgggccatatcagtttccattttgaatagtacattcagaaggttctaagggtcacaatgtctatgattaagaggcaattatatatatatatgtgtgtgtgtataaatatgtgtgtgtatatatatgtgtgtgtatatatatatattttttctttttttttttttaaaggagagggtgcaatgatgctccctagctagtaagagtcccatcttggccttctaagggaaagataggtaaatgaaaagactgctaaatccaaggtcagacagcatatagaaggctttataaaagaacaggaaaactcagaacactaaataagagagtgctttcttggactctgcagttggcctcaatcatcggatctggaatattactttttacgattttggaagccgatacacacctgtaagtaataactgaggaaggtagagtatgattagtctttttacctttcagtgtgtatcaatgttaagtgaacaagagcaaaaggaaaaccatatatttagtattttgcaacatatataaaataacaacactggctgggcgtggtggctcaagcctgtaatcccagcactttgggaggccgaggcagggggatcacaaggtcaggagtttgagaccagcctggccaacatagtgaaaccccgtctctactcaaaatacaaaaaattagtcgggcgtggtgatgggcacctgtaatcctagctactcgggaggctgaggcatgatgatcgcttgaacctgggaggcagaggttgtcgtgagctgagattttgccactgcacaccagcccgggaaacagtgcgagactccgtcttaacatgaaaaacatgaacagccgctactatctgagggcaattttttgtctttatactttggcatgtatattatttctacaaataattttaaaggccaggtgcggtggctcacgcctgtaatctcagcactttgggaggccgaggtgggcggatcacgaggtcaggagatcgagactatcctggctaacacagtgaaaccctgtctctactaaaaaatacaaaaaattagccaggtgtttggtggcgggcacctgcagtcccagctactcaggagtctgaggcaggagaatggcatgaacccgggaggcggagcttgcagtgagccaagatggcgccactgagctccagcctgggcaacagagcgagactatgtctcaaaatagtaataataataattttaaaataagggggaaaaaatcactgataaaccaaaaacctcaaccttaagaaacgttcacatctgtatagctaatactctgacgatggggatacaaaaacaccttcactcagtggtcttgcagatatcatttttttcccagtattttttggaaagaaccaatctttgtctttttttctccttcttcagggaactttatgaatccagaaagagccaacgtttgaatgattactgcaatctcacatctattaaatcctgatacctgcaaccaagagatgagtaggagatgtggatcctaagaggtgacctgtaacatactgcccctcaaaccacatctttggatttcaatagaaagaacagagagaggccggtcgcggtggctcatgcctgtaatcccagcactttgggaggccgaggcgggcggatcacgaggtcaagagatcgagaccatcctggctaacacagtgaaaccccatctctactaaaaaaaaaatacaaaaaaaaaaaaaaaagaacagagagaattaaaccagctagggccacacgcggtggctcatgtctataatcccagcactttgggaggccaaggtgggcagatcacaaggtcaggagttcgagaccagcctggccaatatggtgaaaccccatctctactaaaaatagaaaaattagctgggcatggcggtgggcacctgtagtcccacctactcaggaggctgaggcagaagaatcgcttgaactggggaggcggaggctgcagtgagccgagatcgcgccactgcactccagcctcggcgacagagcgagactctgtctcaaaacaaaacaaaagaaaaaacagctaaactatggcaaagaggcattaatgaatttattgatagcaaacaaagaagtaaagataagaggtgaattcagcagactccagaaagtcaacttttggtttgggcaggaaggagtgaaccagtaagaaacagagcttgaggtcctccgtgattacagtcccaagaagaaacttccacaagtctagaatactctagagctctcactggcatgaaacgaactgctaagattacagtccataatttgtgatccttgctttaagaattctgggatccagggcaggtgcggtggctcatgcctgtaatccccagcactttgggaggccaagacgggtggattacctgaggtcaggagttcaggaccagactggccaacgtggtgaaaccccatctctactaaaaaaaaatacaaaaaattagccgggcgtggtggtgggtgcctgtaatcccagctactcgataggctgagacagaattgcttgaacctgggaggtggaggttgcaatgagcttagatcacatcattgcactccaacctgggcaataagagtgaaactctgtctcaaaaaaaaaaaaaaaaaaaaaaagaattctgggatccaatcaggcacattggctcacgcctgtaatccaagcactttgggaggccaaggtgggaggatcacattaggtcaggagtttgagaccagcctggccaacatggcaaaaccccatctctacgaaaaatacaaaattagccgggcatggtggcatgtgcttgtaatcccagctactcgagaggctgaggcaggagaatcacctgggtccagaaggcggaggttgcagtgagccgagatcatgccactccactccagcctgggcgacacagcgagcctctgtctcaaaaaaaaaaaaagaattctgggatccatttgtcatcctttccagaagacttcctccagtactaagaaagtccacaagccccttgaccagtttcactgacgtcaagaatcagatcctgctagggtagaaaaggtacggaatgagctcagactgtggcaaggtcatgagggttgtgatgaaacaagaatgaaacaacctctccccacaacatattctagaaagcagagatgtcagaataaaggaatcctccagaggcctggcggctgagtggaggcattttatttaaaagcttcaaactacccacaccttttgattaccatctggctttttctatttttcttttgttttcttttttttttttttcctggacagaattgactggggtctgactttttcttaaatgtaaattccaatataattttacagctggtatttccagaattagatccagaaatcaacactagcactactctctgaaagtgtttcagaatgcaactcttaactgctgaagagaatcaagtagtaacctggagcaggccaaatgagttacagacattacagagaaagatcgatcactttggcagagcctctctgtgagctttagctagttttcctaacgccagctggtatgctacgttagctacccaaggcagggggactatggtatcacagtgaccacagaactaagcttttccaactctcctggggcacctgcacaagtgctagcatttcccagactacctctaattaaggaacaaacctttttccctactggaaaattcaaaagtgctttcatctctgctccctgcccccgaccagaagaggttttattagagttctgatgtcacactctctgctttcctgggtggcatctgaaaaaggaccacctgtgccttcagggtagatttgtgccagtgagaaaacctcagcttcaggaattcatgaccagcctggtcaaccatggtgaaaccccgtctctactaaaaatacaaaaattagctgggcatggtggcacacacctgtaatcccagctactcaggaggctgaggcaagagaatcgcttgaactcgggaggtggagggtgcagtgagctgagatggcaccactgcactccagccagggtcacagggcgagactccgtctcaaaataaataaattaaataaataaataaataaataaaacaaacaaaaaaaatctcagctgtatttttttttttttttttgagacagtcttgctctgttgccccggctggagtgcagtggcgcgatctcaggtcactacaacctctgcctcctgggttcaagcaattctcctgcctcagcctcctgagtagctgggattacaggtgtgcaccaccatgcccgactaatttttgtatttttagtacaaacagggtttcaccatgttggccaggctggtctccaactccccacctcggcctcccaaggtgctgggattacagacatgggccacaccgcccagcctcatgttttttgatgggaaaaggaggagaagataaagtactggcaaaggcatttttccgtggggaatgggggataaagtgatctctagagagctcacttcccagcatagcctcgccactcacaatctagtgtctttcagtacttcattagttctcttctgccttcctttcactgccttcaaaaaaaaaaaaaaacacagacaaaaaacaacagctcccctagcccccaaaaacccagggtggccagcccagcttctgattcatgctgtggctcaaaaatgaagtttacacacttgaattaaaaagtaaaattggaggtcatgcgtggtggctcacacctggaatccccagcacttcgggaggctgaggtgcgtggatcacttgaggtcaggagttcgtgaccagcctggccaacatggtgaagctccgtctctactaaaaatacaaaaattagccgggcatggtggctcgagactatagtcccagctactcaggaggctgaagcaggagaatcacttgaacccaggagatggaggttgcagtgagccgagatggcgccactacactccagcctgggtgacagagcaagactccatctccaaaaaaaaaaacaaaaacaaaaacaaaaaaacaaaaaaaacaaaaagagccgggcatggtggtgtgcacctgtaatcccagctacttgggaggctgaggcacgagagtcgtttgaacccaggaggcagaggttgcagtatgccaagatcatgccactgcaccccagcctgggcaacaaagtgagactttgtctcaaaaaaaaaaaaagaaaaaaaaaagccaggtgcagtggctcacacctgtaatcccaggaggctgaggcgggcgtatcatgagatcaggagatcaagaccatcctggctaacatggtgaaaccctgtccctactaaaaatccaataacaaaaattagctgggcatggtggcaggcgcctatagtcccagctactcgggaggctgaggcaggagaatggtgtgaacccaggaagcagagttgcaatgaggcgagatcacgccactgcactccagcctgggcaacagagcgagactccgtctcaaaaaaaaaaaaaaaaaaaagtcattgccaatatctgattcttctcatccatgagccaaaggcttacctaaaaagacttttttttttttttttttttttgagacagggtctcactctgtcactcaggctggagtacagtggcacaaacacggctcactgtagtctcaacctcccgggctcaagcaatcctcctgcttcagcctcgtgtgtagctgggaccaggggcatgccaccacctggttaatttttaaaaatttttttgaagagatggggtctcactttgttgcccaggctgctgctgaactcctgctgaagcaatcttctggcctcaagtggcctcccaaagtgctgagattacaggtatgagcctcggtgccagccaaaagactccttttgataatcaaggggaaagttttatcctacactgctccctattccgttactcctgggttccaagaaatgtagcttaaacctaagggagacaccaaaatgctgctctgggaaaaataagcagtaccaaagacttcaaaaattacaagtttatcaaatcagactctgcaaaatcagtcatctttatggtctgttacaatgaaacaatccattcaacaggtaattttgttagcccaaataactaagaatctcccaactagtacatttcactatatgactgacctgaataatgtttagccattgctcaaaggcctttttcttctccatctttaactcaataggggaccgtaaagtcacttgcaattgtgacctcacaactctaggctagaggaaacagcaaggaagagagatgggtatttactctagacttactctcctgaaaatctagaaatatatctgccacaaaccatcttcatgctgctgaacacatgtggctcaaggcatttggaaacctgcttctaaactatacccttagaacctgtcacaacaggtcctcttcccatcctgtttcctgtccccaccctgattcccccaaaggtactatttataccactgctctctttggcaaggatactctgtccgggatctacttattattacttaactcatctctgatccagagttttctcttgaattctttattattcaggtaccagggaagtattctccctgcatattctaacttttcaatttgagagtgaccttcctaagaccacagcctgtctcctaatcatccttccatgttacagagtcaggggcaagattattcagacaataaatgtttaataacttttactggctcacattcctgaaggatagcacatactttaattccaggctccgaaaatttgtggtacatggataatacaagtgttaacaactgtgtgtgtatgtgtgtgtgtacaggtaactttactaggggagtgagaggaaagaggagataaaaatgcctggtactttttttttttcttcagttttttgagacaaggtctcacttaggtggtccaggctggagtgtggtggcttaatcttggctcactgtagccttgacttcctgggttcaggtgatcctccaacttcagcctcctgagtagctgggactgcaggcatgagctaccatgcctggctaattttttgtatttttagtagtgacagggtttcatcatgttgcccaggctggactttttttttttttttttttttaagcctgggcactacttctgcactgtattgaaaagtattatttggcctctgtgtttttgcttttttattttactgtaagttctgggatacatgtgcagaacgtgcaggtttgttacataggtatacatgtgccatggtagtttgctgcacctatcaacctgtcatctaggttttaagtcccagatatgcattagtatttgtcctaatgctctccctccccttaccctccacccaccgacaggtcctggtatatgatgttcccctatgtccatgtgttctcactgttcagctcccacttatgagtgagaacatgcggtgtttggttttctgttcctgtgttagtttgctgagaatgatggtttcctgcttcgttcatgtccctgcaaaggacatgaactcattcttttttatggctgcaggcttctgtgttttaatgttttaattcctattaagtaaaaatgagtgttccccccacccccgcttttttttttttgagacagggcctccttctgtcacccagactggaatatggtggtgtgatcttggttcactgaaacctccacctcctgggctcaggcaatccttgcacctcagcttcctgagtagctgggactacaggcgcatgtcatcatgcctagctaattttttttttgtgtgtgtgtgtgtgtgtatatatatatatatatatatatttttttttttttttttttttttttggtagaagtggggttttgccatgttgcccagcctggtcttgaactccgaactcaagtgatccacccacctcagcctcccaaagtgctgggattataggtgtgaaccacctcaccaagccaatttttcattacgttatataatagacttgaggtttcaaagctctatcaggactggatcgctgtaacttgagctgaactaccttagaaaggtagagtgaccactgcatttaatcacattcataattctaagcagagttgtcagactgagtagaattttgctcataagtacctggatctatgctcagcaaggcaatgaaaacatcaagagaccagaagaattctgccaaacacttaaggtaaaactagtaccaattcttctcaaactcttcccaaaaatcaaagacgacgaatacttccagatacacttccaaactcattttacgacgtcggcattaccctgataccaaagcgagacaaggacactacaagaaaattacaggtcaatatccctgatgaacaaatatgcaaaaatcctcaacaaaatactaacaaaccaaattcaacagcccattaaaagaagcattcaccatgatcaagtgagatttatcccaggaatacaagggtggttcaacataaacaaatctataaatgtgataaaccatacaagcaaagtgaagggcaaaaaccatatgatcatcacaacagatgcaaaaaagcatctgacaggccgggcgcggtggctcaagcctgtaatcccagcactttgggaggctgaggcgggcggatcatgagatcaggagatcgtgaccatcctggctaacacggtgaaacccagtctctactaaaaatacaaaaaattagccgggtgtggtggcgggcgcctgtagtcccagctactctggaagctgaggcaggagaatggcgtgaaccccggaggcggagcttgcagtgagtcgagattgcgccactgctctctggcctgggcgacagagcgagactccgtctcaaaataaataaataaataaataaataaataaataaataaataaagcatctgacaaaattcagcatactttcatgagaaaaactcaacaaattgggtataaaagcaatgtacctcaatacataaaggccatatacgacaagacttcagctaacatcatactcaacggtggacagctgaatgcttttcctctaagatcaggaaaaagacaaggaccactctagccactttttttttttttgagatgaagtctcgctctgtcgcccaggctggagtgcagtgatgcaatctcagctcactgcaacctctgcctcccggggttcaagcgattctccttcgtcagcctcctgggtaggtgggactataggtgcatgccaccatgtccggctaatttttatatttttagtagagacggggtttcaccatactggccaggatggtctcgatctcctgacctcatgatctatccgcctcagcccactccagccacttttattcaacatagtactgtaagtcccagacagagcaattaggcaagaaaaataaataaaaagacatctaaatcggaaaggaagtaaaattttctctgtctgcagatgacatgatcttacatatagaaaacgctaaagactccaaaaaactattagaactaatgaacaaattcagttaagtagtagcataaggaaatcaatgtataaaaatcagcagtgtttctatgtactaagaacaaactatccaaaaaagaaataaataaaacaatctcacaataactaccaaaaaaaaaaggcttgggaataaatttattcaaagaggtgaaagacccatacactaataagtataaaatattgaagaggatgggtgcggtggctcatgacagtaattccagcactttgggagactgatgtgggcagatcacctgaggtcagtagttcgagaccagcctagctaacatagagaaaccccatctctactaaatatacacaaattaggtggtcgtggtggcaggcacctgtaataccagctactcggaaggctgcagcaggagaatcgcctgaacttgggaggcggaggttgcagtgagccgagatcgcaccattggactccaacctggatgacaggaatgaaactccgtctcaaaaaaaaaacccaaagaaacaaaaacagagttcagagacaatctacagggagagagaaaatatttgcaaaccatacatccaataaggggttaatatccaaaatacataaagaaatgactcaacagcaacaaaacaacccaattaagaaatgggaatagaactcaaaagacactgctccaaagacatacaaatggccaataggtacgtgaaaaaatgctcaacattggtaactgtcagagaaatgcaagttaaaaccacaatgaaattagctgggcatggtggctcacacctgtagtcccagctactcgggagactgaggtggggggatcacctgagtccacgaagtcgacgctgcagtgagccatgatcatgccactatactccagcctgggtgatggaagtgaaaccttgtctcaaaaaacaaaaaaccaaaaacaaacaaaaataccccacatcaactcacacctgtcagaatggctattaaaatatatatatatatataaattgttggagaggatgtggagaaaaggaacctttgtacactgttgatgagaatgtaaattagcacagctattaggaaaaacagtatggaggtttctcacaaaactggaaacagaactaccatatgatccagcaatcccactactgggcatatatacaaggaaatgaaatcagcatgttgaaaagatacctgcactcccatgttaactgcagcattattcacaacagccaagatatggaatcagcctaagtgtcagtctatcaatggatgaacagatgaaagaaaatgtatataaacacaatgaaagactattcagtcttagaaagaaatcctgccattttaagtaacatgaatgaacctgcaggacattatgttaagtgaaataagtctgacacagaaagacaaatactgcataatttcactagtatgtggaatctaaaaaagtcaaactcagaagcagagagataatgggctgaagaggggtgactggggagaaggaaacaaaattttagctaagcaagagaaacaagttcaagagatctactgtacaacatggtgactatagttaataacaatgttttgtttacaggcatgccccatttcagtcaacactagactgcacatacaatggcagtcccataagatcaaaatatcgaggggccaggcatgctggctcacacttgtaattccagcacttgggagcctgagatggtaggatcacttgagaccaggaatttgagaccagccaggacaacacagagaccccatctctacaaaaaataaataattagctgggtgtgttggcacatgcctgtggtcccagctgctcgggaggctaaggcaggaggatcacttaggctcaggagctcgaggttgcagtgagttatgaatgcaccactgcactccagcctgggtgacacagtgagaccctgtcttaaaaaaataaataaataaaataaaatctaatttagggaaataatcaaagatgtgaaaaaagatttacaggaaattctcttcactgcagtgctgttcataattatttaaaaactggaaataatctaaatggattatggaatctaaataactcccaaaggaggaaaatggttacataaattttgtggtattcatctaataacattagcatgagcctcctaatatgttaatattgttaaaggatatctaaagataaacaaaaatgcttataatatgaatgctgggtatgtaaatatggtataacaagaatttttaaaaattatatgcacacaaaaattatgaagtcacttgtatttgatcatcaaatgcattacagcatttgtggggataaattctcattcttgctgggcacagtgacatatacctgtaatcccagctacttgggaggctgcagtgggaagatcacttgagcccaggagtttgtgtccactctgtgcaactatcaaaaccctgtctctttaaaaaacgaacaaactcggccgggcgcggtggctcacggctgtaatcccagcactttgggaggccgaggcaggcggatcacgaggtcaggagatcgagaccatcctggctaacacagtgaaaccctgtttctactaaaaaatacaaaaaattagccgggtgaggcggtgggtgcctgtagccccagctacttgggaggctgaggcagaagaatggtgtcaacccaggaggcggagcttgcagtgagccaagatcgtgccactgcactccagcgtgggtgacagagcgagaccctgtctcaaaaaaaaaaaaaaaaacaaactcattcctagactgtctagtttaggataacatacaaattagtttctcctaatttggattacagaaacataaaattgacagagccaggaagtaacccaggaaaaagatgtggtagcaaggacaagtcattcttggagaagttttcaaaaggggaatatccacgggtaaatgtcaactgaagctcagatcacctcaagaaacctgagattaacaaaaaggcactacacagaagtgggtaagagaacactggaagcacactgactaaatttgaatcccagctctttgcatttaccagctgtgtgaccttgggaacatagtttaccaccatttataaaatgtaccctaccttcatgagatttttttttttttttttaaacaaagtctcgctctgtcgcccaggctggagtgcagtggcaaaatcttggctcactgcaacctccgcttcccaggttcaagggattctcctgcttcagcctccctagctgggattacaggcacgcaccagtgcatccagctaattttttgtatctttagtagagacagggtttcaccatgttggccaggctggtcttgaactcctggcctcaaatgatccacctgcctcggcctcccaaactgctaggattataggtatgagccactgcgcccagacttttttgaggctgagtctcactctcttgccctggctgtagtgcagtggcacaatctcggctcactgcaacctcttcctcctgggttcaagcgattctcctgcctcaggctcccaagtagctggggttacaggctcctgccaccacgcctggttaattttttgtatttttagtagagatggggtttcaccatgttggccaggctggtctcgaactcttaacctcaggtgatccacccgcctcggcctcccaaagtgctaggattacaggtgtgagccaccaccacacctggccgagattattttgaagattaaatttgggtttaacatattccagtgcttaggtgcctgatacacagtaaacattatttacatgttggctcttgtggggcacagtggctcacatctgtaatcccagctactcaggaggctgaggtaggaagactgcttgaggccaggaatttaagaccagcatgggcaacgcagtaaaattccaactctttaaaaacttttaaaaaattagccaagtgtggtggcataaacttatagtcccaacgacttaggaggctgagaggacagaattgctggagctcaggagcctgagcttgcagtgtgccatagtgacacctgtgaatatccactgtactccagcctgggcaacaacagagtaagatcccctctcttaaaaaaaaaaaaaaaaaaaaaaaaaaaaaaaaaaaaaaaaggcaataatcattactattacttttcactgggcgcggtggctcacgcctgtaatcccagcactctgggaggctgaggtgggcggatcaggagatcgagaccatcctggctaacacaatgaaaccccgtctctactaaaaatacaaaaaattagctgggcgtggtggcagggacctgtaatcaaagctactcaggaggctgaggcaggagaattgcttgaacccaggagatggaggttgcagtgagctgctctgtcacccaggcttcaatatccaatggcgtgaaacacggctcattgaagcctcaacctcccgggctcaagtgatcctcccacctcagccttctgagtaggtgggactacaggtgtgagccaccatgcccagctatttttttttttttcctttatgtagagatggggtctcactatgtttcccaggctggtcttaaactcctggactcaaatgattctcccacctcagtctcccaaagtgctgggtttataggtatgagccactgtgcccagccttaatttgaaatttaaaacaatcctaatctagatggaacaagtattattctctttctacagataaggaaacccaggctcagaaagattaagtaacttgttctgtgatataaagctgggtcagtggatctggtattgaatctctgtcttagttcctagacatgtgatcattccattaaatattttccaatctgcaggctgtgaccagccttttaaaagtgttgaatttaaaatgccacaaaataatagtaagcatacttattttttcatgactgttatctatattctatgtgtgtgtttactgagatgcaatctttatcgtgggcatagataaaatgtctgaaaaacattgaacggttccatagctgcctctctagtcaatgtttaacaagcacatattatatccctctgattacactattatatacgacaaaaacacacaattctaagccgtggttttgatgatgatgatgatgaggatgaggatgatattatttttgagacagagtttcgctcttgttgcccaggctggagtgcaatggcacgatttcagctcactgcaacctccgcctcccaggttcaagcaattctcctgcctcagcctcccaagtagctgagattacaggcatgtgccaccatgcccggctattttttttttttttttgagacaaagtttcactcttgtagcctaggctggagtgcaatgacgcaatctcgcaatctcagcttactgcaactccatctcccaggttcaaacgattctcctgcctcagcctcccgagtagctgggactacaggtgcctgccaccatgccctgctaatttttttgtatttttagtagagacggggtttcaccatgttagccaggatggtctcgatctcctctccgcctgccttggcctcccaaagtgctgggattacaggtgtgaggcaccacacccagctaatttttgtatttttagtagagacggggtttcaccttgttggccaggatggtctcgatctcctcacctcgtgatctatccacctcggcctcccaaagtgctgggattacaggtgtgagccaccacacccggccataggttttgtttttttttttaagtgtgcatgtaattactgacttcctaatgaattggaggaatcacctctcctaggccaacactttgcaatgtaactcattcttatgctttggctagcctaacactttgaaatcaattcatagtgaaaatcctttcaaagtgaaggataagacagcaactataagcaaggtaaatccgctgggaaaatgactatacataggcaaaggaaagcttgaagtggtcagacttttattcccccaggggagagctgtattattcacacagagtaaactgtatcaaaacacaatacaactaatgatggaatagttacctctcattctcaagcaatcctagcacagaaaacccttccccttgtatcctcattctctccctgaatgtaagaagtaaaccctgactttaagcctactctcaactcatacctttcctaagtcagttttcatttggacacttgtgctgtgacatcttttggaagctgggcatcatacagcccgcccaggtctctagcaggaagcatctccctgctccctatattattttgaattttctgggaaaaaggatttcacatgtgtacttggccatgtacccactatgtatccatttggtctgacaacttcttagaactagttctctgtgcacaacgccttgccatacattgctagtgaagagtttcagaaaggacagtaaattcagggcagggagaatgaagttttacttatagctaacacactgcccttcactgtattttttttttttttttttttttttttttgagacagagtctcgctctgtcgcccagcctggagtgcagtggcgcgatctcgagtgcagtggtgcgatctccgctcacggcaacctccacctcctgggttcacgccattctcctgcctcagcctcctgagtagttgagactacaggcgcccgcaaccacgcccagctaatttttttgtatttttagtagagacggggtttcaccatgttagccaggatggtatgatctcctgacctcgtgatccaccctcctcggcctcccaaagtgctgggattacaggcgtgagccaccatgcccagcccccactgtatcttctattcttctgttatctagggctagtttcccaatcttgccaaggcagattataaggtaatacagaaagacaagtttgatacattaatgcattctattccctttaggcccttccttctcctcccccagcctgagtatggaccatgaggaatcctgatatgtaataacctttgtcaaaggcttctatatagccttagtgaaaatcaaagcacttacattgcttgtcactgagactcactataacttgaagatttatggttcacgctccacatgtccaaggaattagcaggtttctgaagctaaagggtctctgaaagctcaagaggctgctaagcttaaaggggcccgagaattgaaagcttaaaggaagaggtggagcacccccttccacacctggcagaccacaactagctaatgaaatttgcaatgctgggtcaatctacaggaaggaaaaacagatatacagtccctgttagaataatactttcatagctagggtaaacacacagataaagattctgaaattcactttaggaagcttcctcatttcaggaactgtctgcaaaacaaataaaaaactaataaagtagtctttttttttttttttttgagacggagtttcgctcttgttgcaggctggagtgcaatggcacgatcttggctcaccgcaacctccacctcctgggttcaagcaattctcctgcctcagcctcccgagtggctaggattacaggaatgtgccaccacacccagctaattttgaatttttagtagagatggggtttctccatgttggtcaggctagttttgaactcccaacctcaggtgatccgcccgcctcggcctcccaaagtgctgggattacaggcgtgagccaccgcacccagcctaaagcagtcctttaaacctctaaagtgttgaaagtaccacaactcactcaatgatcagcagaattatttggctcccttctgtggacctgagaaattcaaaagtcattcagaattgcttttttgtttgtttttgacacaaggtctcaccctgtcatccaggctggagtatggtggtgcaatcatagctcactgcaaccttgaacttctaggcttaacggatcttcttgcctcagcttcctgagtagctgggattataggtgcacaccattgcatgtggctaatttttttgttttttatagagacaggtttttgccatgttgcccaggctggtctggaactcatgagctcaggcaatctgcctgcctcggcctcccaaagtgctgggattacaggcatgagccaccgcgtccggcctcagtattgttatttatcaaagtgtgtgactgcttctaacctgtcaaatatgcatcttatactacatattaagtcccaccaaacaagtcatttaagtcaacattattttagcattgagttaatcggggaggaaaaatccaataaatatacatgtaactctaaagatgcccaaataattgtaatttgccctcccttttaaaattaatttacttttgttttttgagtcagagtctcactctgtcatccaggctggagcgcagtgatgcaatattggcttactataaccactgcctcccaggttcaaacaattctcctgcctcagcctcccgagtagctgggattacagatgcccgccaccacacccacctaatttttgtatttttagtttagtagagatggggtttcaccatgttagccaggctggtcttgaactcctgatttcaggtgatctgcctgcctgcctcggcctcccaaagtgctgggattacagatgtaagccacagcgcccggccttgcctttcttttatctcaaagatacctcaaaaaaaaaaaaaaaaaaaaaaaactaacacccccccgacaagtaatcttatggatagtggtagaaaacaaaagttcaaaattcttctattactggtacacatcttcttcattctgtgtccttttttttttttttgagatggagtctcgctctgttacgcaggctggagtgtgcagtggcggaatctcagctcattgcaacctctacctcctgggttcaagcaactctctgtctcagcctcatgagtagctgggattacaggcacccaccaccatgcacagctaattttttgtattcttagtacacacggggtttcaccatcttagccaggctggtcttgaactcctgaacgatccacctgcctcggccccccaaattcctggggttacaggcgtgagccactgtgcctggcccactgtcctctttaatttcttctctctttgggacctcccttaccaactcagtgtccttatcaacttttacccagttctattaagtcacttcaattgaattagaaatggaagctacccaaacagaatgagaagagtactggatgcagtgatcactcccacccaattgcaatgagccccaacagggcctactcttggtttctaaatactgcattttccattgaaaggaaccaaggctccttggagaattgactgaggcagagaaagtactagatgagtctaatatatcttattgtgcaggaaaggaagtgctcaaagaataacagtgaaatatcaaaggacaaagaaggcacaagatgcttagttggtgagggaaaccccagagacagaagtttacacagtagaaattagagaagacattgagtgggtacactgggtaaagcaggcatgttaccagaatacaacagttgtgaatttttcttttctaccattgcctgtaaggtgttagtttggggagtatttatctgtcaacctattgaaataaaagaatggcagattatttgggcatttttatgattaaacatatatttatataattttttttcttgatttactggccaaatcgggaataatctgagcatcaaaataaataataaaagatgatatttcattgaataaaacaagaaatcattagttcatactaatgtaaacaaatacattggaaggctgaaaaggaatgcaatatttgtatagtttctaagccctgtctcctaaaaatactaattacaaagggaaaatgagtaactttacttaggaaaagcctagcaaacaccaccttaatcaagtgatcaaacattatcagtaacgatacaaatcaaaattctgtaccttttgaaatcatgcagtgaagaacacagcatcactcctgtgatattcctgttgaagatatgttacctaaattaaacacaaggaaccaccagacaagtccaaattgagggactttctacaaaataacttaatagcatcaaggttatgaacatcaaagaaggcctgaagaaactgttccagactggaggagactaagacaacatgaaaaataaatgcaatgtgtgattctgacctggatcctttttgctataaagcatataactggtataataacaagcaacatttgaagaggatctgataattatatggaagtaatgtgtcaatgttactttcctgattttgacagttgtattgtggtaaagttggagaatgccccttgtttataggaaatactaaagtattcaaggatgatggaacatcaggtcagcaacactgtcaaatgattgaaagaaaaaaaattatttctagcatacttacaactgttctatatatttcaaattgtttcactttttttttttttttttttttttttttttttagagacagaatcttgctctgttgcccaggctggagtgcagtggcgagatcttggctcactgcaagctccgcctcccaggtccacgccattctcctgcctgagcctcctgagtagccggcgtagctgggactacaggtgcccgccaccacgcccagctaatttttttttgtatttttagtagagacggggtttcactgggctagccaggatggtctcgatctcctgatgtcgtgatctgcccacctcggcctcccaaaagctgggattacaggtgtgagccactgtgcctggacaaatttttttattttaaaaaaatacaaggttgaagtctagaaagggtggggttggagatcaaaaagagatgagagtggtctgttagcaactattctcatttatcttaatggagaagacatctctaaattggtgagtgtgccactggggttcttgccacttggaataggtttcctgtatctttctgcctcatcaacttccaatttcttctcaacagttttttgaataacattttctccagtgcctatacttcaaattatctccctacttccactctgttctgggaatgcttccactgtgagcattcatggactcccttattctaaagatagagaatttcgccattggaaagcaaaaaacaaaaaacaaaaaacaaaaaaacacctaccctaagccaggtgcagtggctcatgactgcaatcccagctctttgggagattgagtcaggagaatcacttgagcccaggaatttttttttttttttttttttttgagacagagtctaggctggagtgcgatctcggctcactacagcctccactttctgggttcaagtgattgtcctgcctcagtctcctgagcagctgggattacaggcacgtgtcaccacgcccagctaatttttgtatttttagtagagactgggtttcaccatgttggctaggctagtctcctactcctgacctcaggtgatctgcccgccttcgcctcccaaagtgctgggattaaaggtgtgaaccacctgtgcctggccatgcccaggaatttgagaccaccctggatagcaaagtgagaccatgtctaaaaaaattagccaggtgtaggccaggcgcagtggctcacgcctgtaatcccagcactttgggaggccaaggcgggcggatcgcgaggtcaggagatcgagaccatcctggccaacacggtgaaaccccgtctctactaaaaatacaaaaaaattagctgggcgtgatggcaggcgcctgtagtcctagctacttaggaggctgaggcaagagaatggcgtgaacctgggaggcggagcttgcagtgagccgagattgcgccactgcactcctgcctgggcgacccagcaagactctgtctcaaaaaaaaaaaaaaaaaaaattagccagttgtggtggtgtgtgcctgcagtcccagctacttgggagctaaggtgggagaatttcttaaacccaagagtttgaggcttcagtgagccgtcatcgtgccactgcactccagcctgggcgacagagtgagaccctgtctcaagaaagaagaaacaaacaagttgggcgcagtggctcacatctgtaatcctagcactttgggagggtgagtcgggtggatcacctgaggtcaggagttcaataccaccctgggcaacatggtgaaaccccatctctacgaaaaatacaaaaattagccaggtgtggtggcatgtgcctttaatcccagttacttggggggccaaggcacgagaactgcttgaacccaggaggtggaagttgcagtgagccaacatcacatcatttcactccagcctgggtgacagagcgaggccctatttcaaaaaaaaaaaaaaaaaagaaagaagaaacaaacagaaagagaaatgtctatcttgaaggaggagctgttaatgatcctcccttcttcatacctgacattcaccaccatctctttaactgccatgttcacttttcattttttcatctttttttttaagatagggtctcactctgttgtccaggcttcattcagtgcagtagtgtgaccacaactgcagcctcgacctcctgggctcaactgctcccacctcagtcttccccaacccccaacacccccacccaacagttgggactacaagcatgcaccaccacacctggctaattttaaagttttttgtagagacagggtcttactatgttgcccaggctggtcttgaactcttgggctcaagcaatcctcctgtcttgacttcccaaagtgctgggattgcagttgtgagccaccatgcccaccccatgttcacattttagtaagagtttctcaaggtccttccttctaaacacacatccagaacctcaagtgtcatgcaaactctcttatattttaaaagaaagccttcttatatcttccagagtgttaaccgttttgacattctttcctcacatcatccaaaaagtttcaaatgacatcataaactttatctccaacttcctgaaaagtacccactatagctagcttctccactttcacaccaacagcagctggccagcagggacttagctattctatagcagaatggttttcagtaaccaatgaaaagctttgtactacaaggatgatgtttatatactccccctttcctcttctttcattgttagtgaggcctgggaagttctagaggtagaacaagtgtgttatgacccttctgcaagcagccatcaacttatcccctactttaaacaaacattaacaaaaaataggctcttaaaatgcattgtcatattctgccatactcaaccaattttttttttttttttttttgagacagagtttcactcttgttgcccaggctggagtgcaatggtgcgatacgggctcactgcaacctccacctcctgggttcaagcaattctcctgcctcagcctccaaagtagctaggattacagccatgcaccaccacgccaggctaattttttttgcatttttagtagagacagggtttctccatgttggtcaggctggcctcaaactcccgacctcaggtaatctgcctgcctcggcctcccaaagtgttgggattacaggcgtaagccacggctcccggctcaaccaaatttttatgcagccaagcccatgaagatatccaaggaaactgatacacccttagaaagagtacacaacaacaaaggatacgaaggcaggcaacatccaaaatgaaaacagcagcaagtcacctgcaaatctaataacagcaccagctggaatctacttgtcttttgctttttttttttttggagacagagtcttgctctgtcacccaggctggagtgcagtggtgcgatctcggctcacagcaacttccatctcccgggttcaagcaattcttctgcctcaagcctcccaagtagctgggactacaaacacgtgccaccatgcccggctaatttttgtatttttagtagagacggggtttcaacatgttggccaggatggtctcaaactcctgacctcaaatgatctgcccgcctcagcctccaaaagtgctgggattacaggcatgagccacagtgcccggcctgtcttttgcattttaaagagataagattttgcttatacccacaacattttaagaagtaacaaaaaaatccaaataaaattaaaattttaaaaatattttgcttgtaagtccacttttcagggtaaccttcaaaaaacaatactgacaggaaagtttgaagaaagcagaaggggacctacaagtcttcttcttcaagaaaggcaaattatgtcccttgtttctatccctctttatccatcttataagggttacttccaaaaatatgtaactttctattaaaataacatactagctgggcatggtggctcatgcctgtaatcccagcacttcgggaggctgaggtgggcagatcacttgagatcaggagtttgagaccagtctggccaacgtggtgaaaccccatctccactaaaaatacaaaaattagacaggtgtggtggcacgcgcctgtaatcccaggtacttgggaggctgaggcaggagaatcacgtgaaccagggaggccaaggttgcagtgagtcaagatcacaccactgcacttcagcctgggcaatagagtgagaccctgtttcaaaaaaaaaaaaaaaccctaaaattcctatacagcaaaagagacgtgtcctcagtgtcctattgatttccttttctttttgagacagtcctcctctgttacctaccctggagtacagtgatgggatctcatatcacggcaacctccacttcaagcgattctcccacctcagcctgccaagtagatgggattacaggcacatgccatcgtgcccagttaacttttgtatttttagtatagacagggtttcgccgtgttgggcagactggtctcgaactcctgacctcaagtgatcctcctgcttcggcctcccaaactgcttacaggtgtaagccaccgcacccagacttcttttgtttttaagacagcatctcactctgttgcccgggctggagcacagtgatgcaatcactgcagcctcgacttcccgggctcaggtgattctcccaccacagcctcctgggcatctgggactacagacatgtgccaccacacccagctaattttttaaaatattttttgtagagaaggagtttcaccatgtttcccaggctggtctcaaactcctgggtttaagcaatccacctcatccccccaaaatgctgggattacaggcactggattacagccaatgtcctacagacttttaaagtgtccaaaccaagttttcttttgcacttagaagagaatttaaaacgcaatcagaaaaccagattgtaccttgccaattactataatcttaaaattagcatatattgctatgaatgacatttagttaatctcagtctattctcctatgataagcaacagtgaactcaagggtatgatctcagaatgtaaaaagccattaagactgctcctaatagattattttaaaatatgatcctataagtctcttccaaggaaggacagtatgttttaattgtgagatggacttttcaatgctttgacttcttgtctaaaagaggcctggaaaaagaaataactgcagtggagtgagggtgtgaaatgtgtcataccggttattaaaatccatcaagttcatacttcagtcttggtttaactgcagccaaaaactgacttgcaagtaattatcatcactatctgcaataaaagttaattggacataattgaactaacaccctaagcggagggaagctgtaactggcaaagagcccattcctcctgcttcttcaatctgcaaatgaaactgctaatgataatttgtggacaaacatgaaattgctctcatggtttccccactgcaaatcactcagcaattccagttaatacccagcatgttgggccaggagaaaaatcattaactggtgcttcctttgataaagatgaattttaacaataaacaagcccattaaggctgagagttactgagaattgttaaatttcccctggatgcgctaaagtaaagcactgtggtctgatctccacaccatgctactatgcactaaatgcatcatgtgccaccagtgtgtagtagtaagaagagacagtatgcaaagacagaagctactgttatactaacaatttatcttcttttaacaaaatcctggaaaaatcttatttttcaacaggcaaatggcattgttgatctacttcaacagcaaagattaaaaaaaaaaagaaagaaagaaagtggacccaacacctttcagaataattgtgaggattaaatgagatggtatttgcaaagtggttagtacactgcctatgcttgacggcagttataactattatttgctaatgtcagacttctctgaaaaccatggggagatagggataggttttaaggcaagtaacattatcagatgtctatttagaataaatcttcttcaagtgtgaaagaaaaacaggagatggtagaagccagttaagtggctattgctttttttttttttttttttttttttgagacaaggatctcgctctgtcacccaggctagagtacaatggtgcgatctcagctcactgcaaccttcccctcctgggcttcagtgattctcttgcctcagcctcccgagtagctgggattacagacgtaagtcaccacacccagctaatttttgtatttttagtagagatggggttttgttgttggctggtcttgaactcctggcctcaactgatctgcccacctcagcttcctaaagtgctgggattacagacatgagccacagcggctggctggctattgcgattttgaggtgagatgatgaagatctcaaatgagcatgtcataaaagggctatcatataaaggaggaagcagatctgtctctgagctccagagataaaaaataagttaataaagtttttgaagaagggcaattttaagtgaacataaagaacaatttgatcttgttcaacagcaatagagaaatactgaagcaaaagcaattatcattcatcaggaattatggaaaagggtttttttcagtagctaagaatttggactagaccactagaatcaacttttagagtctatgattccaaatcattttaaaaaggtggtttttgtaaggtcattaacaatatcttacatttgtagggagttttacaattttcaaagtgctttttcacatgattctctctccatcttctcaagatgccctttgagataggttgggtatgtatcatcagccccattttcacatataaagatactagaaactggacagccatcacggatcatgcctgtaatcccagaaatttaggaggctgaggcaggaggactgcttgagcccaagagcaagaccagtctggacaacatagggagaccccatctctacaaaaaaaaaattagccaggtgtggtagtgtgcacctttggtcccagctccacaggaggctgagatgggaggatcacttgagccccaggggtggaggctgcaaggagccatgatcgtgccattacactccagcctgggtgacagtgagacccggtcccccagccacacaaaaagagtaataaacgctacgaaaaaaatatgaaaaataaataggtcaggcgcggtggttcacactggtaatctcaacactctgggaggctgaggtgagcagactgcaggagtccaagagtttgagaccagcctggcaagagcaaaacctactaaaaatacaaacaattagccgggtgtgatggcgtgcacctacaatctcacctacttggaaggctaaggtcagagaatcacctgagcccaggaggttgaggctgcagtgagccaagatcatgccactgcactccagcccgggcaaacagagtaagaccctgtctcaaaaataataataacaaattaaataaataaagcagtgtaaggaaatagaaagtactgggtagggtaataattttaaacagcatagtcagagcaatcctcactaagaaactacagtttctccatggtttacctgttagtttcagtgcaagacagcagcacagcttttaattaggtaattttttaaaaagcacttaaccataactaatacagtttttgttttctcatgtgaagtttaatacttaggcacttgcaccccctttttttttttttgaaacggagtcttgctctctcgcccaaactggagtgcagtggcgcgatctcggctcactgcaagctccgcctcccgggttcacattattctcctgtctcagcctcctgagtagcgccactatgcccggctaattttttgtatttttagtagagacagggtttcaccgtgttagccaggatagtctcgatctcctgacctcgtgatccacccgcctcggcctcccaaagtgctgggattacaggcgtgagccaccacaccaggccacttgcacctttaataaaaagcaatttatcaacttgttttcaagaatggaatcctgttgttttttttttctttttttgggatggagtctcactctgttgacaggatggagtgcagtggcacgatctcggctcactgcaacctccgcctcccgggttcaagcaattctcctgcctcagcctcccaagtagctgggactacaggcgcacaccaccatgcccagctaattgttgtatttttagtagagacggggtttcaccatgttgaccaggatagtgtcgatctcttgacctcatgatccacccacctcggcctcccaaagtgctgggattacaggtgtgagccaccgcgactggcctcttgtttttgtaacacagaaaaacttttttttttttttttttgagaccgagtctcggtctgtcgcccaagctggagtgcagtggtgcgatctcaactcactgcaacctctgcctctcgggttcaagcgattctcctgcctcagcttcccaagtagctgggaccacaggcgcctgccaccacgaccggctaatttttttttgttgttgttgtatttttagtagagacggggtttcacagtgttcgccaggatggtctcgatctcctgacctcgtgatccgcccacctcggcctaccaaagtgctgggattacaggcgtgagccaccgcgcccagccaaaactttctttttttaagagacagggctcactctgtcacccaggcttcagtgcagttgcaccactatagctcactgcagcctcaaactcctaggctcaagtgatcctcctgcctcaatctcctgagtaagctgggactacaggtgattgccaccacactcaggtaattattttattttttgtagaaacaagatctcggctgttgcccaggctggtcttgaactcctaggctcaggagatcctcctgccttggcctcccaaagttctaggattataggtgtgagtcaccacacctggcaagaaaggctctttaaacaataagaaaacaaagtaatgcaaacttccacacataccaaagactgctgttgtatgtaactatgactttgataaagactggcatttctctggttgagcaatgatactttcttttttttttttttgagacggagtttcactcttgttgcccatgctggagtgccatggcacgatctcggctcacagcaacctccgcctcccgcgttcaagcgattctcctgcctcagcttcccgagtagctaggattacaggcatgagccaccacacctggctaattttgtatttttcacagacggggtttctccatgttggtcaggctggtctcgaactcccgacctcaggtgatctgcatgccttggcctcccaaagtgctgggatgacaggcgtgagccaccgcacccggcctatgagactttcttaactagttgtgaggaactgaaagatgagcagatgtggacagatgtgaggtggagggagttggtataaacaattttagagagctattaaaattgatgtgcaggctgaagtggcataagcttcttacttctaggcgcactaaggaacaatttctcccaaaatatactatcactgataagaatgacacatttcagttgggacactggttcagcttggagaagaggcaaaaataaaaatatatctggctgaaaaagctgccttttccaacttaattttgccagggactatggaaatagtcaaaggacttttcttaaaatgaaaggttctttttgtctctctggagaaaagttctaacacagtatcactctccaattgcaccatacctcactaaatataggccaaatattaaaatattttgtaaagcactttagtgaatgcacagtaacacctggcaagacaagttaaaactaagatgtggattcttaattaagctactagttccacattttgttgaaaaaaaaaaaaaaaaaaaaagttggccaggcgcggtggctcacacctgtaatcctagcactttgggaggccgaggcgggtggatcacaaggtcaggggttcgagaccagcctgaccaacatggtgaaaccccatctctactaaaaatacaaaaattagctgggcgtggtggcaggcgcctgtaacccagctactcaggaggctgaggcaggagaattgcttgaacctgggaggtggaggttaaagtgagccgagatcgtgccactgcactccagcttggacgacagagcgagactccgtctcaaagaaaaaaaaaaagaccaggcgcagtggctcacgcctgtaatcccagcactttgggaggccaaggcgggcggatcacgaggtcaggagatcgagaccatcctggctaacacagtgaaaccccgtctctactaaaaatacaaaaaattagccgggcgatgtggcgggcgcctgtagtcccagctactcaggaggctgaggcaggagaatggtgtgaaccccggggggcggaggctgcagtgagccaagatcatgccactgcactccagtctgggcgacagcgagactccgtctcaaaaaaaaaaaaaaaaaaagaaaagaaaaagttctgggagagtaagataagcaaaagccaaaccagtatctttacagctgctaaattaatgtcttcataatagtaaaacaggctgggcatggtggctcacgcctgtaatcccagcactttactattattattattattattgttgttcttcttcttctagtaaaaccattcccagctgaatagctgggtaaggcagagggtccatacaggaacccagtaaatgggacttttccctcctaatttaggatgagctgtcttcaacttctcacagacttgatatatctttccttttaaagtagattaagtcctatcctttacataataagaatgaagataaataaaatgccaatggtagaagtgcttagcttttggaaggaagtaaatcttaagttatgactaataatgcttatgcttctcctttgaagcaacacgaatgttgtctaaatcatcccaattctgcaagtggcataaaatctgattttcattcagttcagcaactgatcctcaaaaacactttgctgaatgcaaaaaaaaaaaaagaaaaaaagaaaaagaaaaaaagtgattgttcaggtaatatcttcccagcaaacagcacttaaagaaacccccagcttttttttctgagaaagagtcttactctgtggcccaggtgcaatggtgtgatcggcaatggtgcgatctcggcttactgcaacctctgcctcccaggttcaagcaattctcctgcttcagcctcccgagtagctgggattacaagtgtctgccaccacaccccactaatttttgtatttttagtagagataaggtttcaccatgttggccaggctggtctcaaactcctgacctcaagtgatccacccacctcggcctcccaaagtgctgggattatagacatgagccactgcgcccagccagaaacccccagctttaaagtgatgactgctttccaatttgggcctagcagaatggctcccgcaaagggtggtaagaagaaaggctgttctgccatcaaccaggtggtaacccaagaatacactattgagattcacaagtgcattcatggagtgagcctctaagaagcaagcccctcaggcactcaaagagatctggaaatttgccatgagggagatgaggaccccagatgcacacattgatagcaggctcaacaaagctgtctgggccaaaggaataaggaatgtctcacacagtgtatccctgcgtggttgtccagaaaatgtaatgaagataaaaattcactaaaacaagctctatactttggttacttatgtacctgttaccactttcaaaatctacagacactccatgtggataagaactaaccactggtcatcaaataaaattatacaactgcaaaaacaacaacaaagtgatgacagtactactttcatcacacactgactattctaaatggatttcatttcagccaacagctctgattattagcaagtattgcccagtgttagaaaactttgctttggttaagaagagaggtttgtttctttgctttttctttttttttttgagagggagtcccactctgttgcctaggctggagtacagtggtgcaatctcggctcactgcaacctccacctcccaagttcaagcaattctcctgccttagcctcctgagtaactgggattacaggtgcatgccaccatgcctggctaatttttgaattttagtagagacagtgtttcaccaggttggccaggctggtctcgaatgcctgacttcaagtgatctgcccaccttggcctcccaaagtgtggagattacaggcatgagccaccgtacccaggttcttcttttttctttttagagacacggtcctgctctctcaccctgctctctcactacttgggatagcagctcactgcaacctcgaactcctgggctcaagggatctttccatctcagcctcccaagtagctgggagtacaggcacacatcaccacacccacctaatttttttatagagagggtctcaccatcttgcttgggcgggtctcaaactcctgggctcaagcaatcctcctgcctcagtctcccaaagtgttgggattacaggcataagccactgtgtctggctgcagtttgtttctttggcttagctaccaacagctcacccacatatgatgaattatttacatatactatggggtcagaagacaccaacaatgaagacatttcagccaggtgcggtggctcacgcctgtaatcccagcactttgggaggccgagacgggtggatcaagaggtcaggagttcaagaccagcctggccaagatggtgaaaccccatctctactaaaaaaatacaaaaaaattagctgggtgtggtggcaggtgcctgtaatcccaactacttgggaggctgaggcagagaactttttgaacctgggaggcagaggatgcagtaagccgagatcatgccactgcgctccagcctgggtgacagagcaagaccacgtctcaaaaaaaaaaccaaaaagcaaaaaacaaacaaaaatgacatttcagtatcaaaagctagtttacgtatgacttacttgaaagattttaattctccatagcacctcagtgtgattaagtaacaaaggtcaggtctcttcgggaaccaggacatctatcttctcctccccttggcaatcagagctcctagttcttaggcctttggtctcagactgaatgacaccaccagctttcctggttctcgggcttgcagacagcatattgtggaacttctcagcctccataactaaatgagccaagtcctaatcccctcttatatatttaccctactggttgtttctctggagaatgctaatacagattttttttttttttcaggcacagtctcgccctgtcgccagcctagagcgcagtggcgcgatctcggctcaccgcaacctccacctctcgggttcaagcgattctcctgcctcagcctcccgagtagctgggactacaggcacgcgccaccacgcccagctaacttttgtattttttagtagagaaggggtttcactatgttggccaggatggccttgatctcttgaccttgtgatccacacacctcggcctcccaaagtgctgggattacaggcatgagccaccatgcctggcctctaatatagattttatatttagtattaaataaaacaaactgtcccaaggatactacattgagctgaatttttctaggtccagtactgagttatatactacttttgatgattaagaaactaagtgcaggccgggtgcggtggctcacgcctataatcccagcactctgggaggccaaggtgggcagatcacaaggtcaggatatcgagaccatcctggctaacacagtgaaaccccatctctactgaaaatacagaaacaaaattagccaggcgtggtggcaggcacctatagtcccagctactcgggaggctgaggcgggggaatggcgtgaaccccattggcagagcttgcagtgagccgagatcacgccactgcactctggtctgggcgacagagcgagactccatctcaggaaaaaaaaaaagaaagaaactaagtgtagtctggacatgatagctcatggttctaatcccagcacttgggaggccaaggtgggaggatcattggagcccaggagtttgggaccaacctggacaacatagggagaccccgtctctataaaaaatgaaaaaagtagccaggcatgatgatgcgaacctgtggtcctacctactcaagaggctgagatgggccgggcatggtggctcacaccactttgggaggccatggcaggcagatcacttgaggccagaagttcgagaccaacctggccaacatggtgaaaccccgtctctactgaaaattcaaaaattagcctggtgtggtggtacatgcctgtaatcccagctattcaggaggctgaggcacaagaatcacttgaacccaggaggtggaggttacagtgagccgagatcatgccactgaactccagcctgggtgacagagcaagcctcccatctcaaaaaaaataaaagaggctgagatgggaagactgcctgagcccaaggggtggagactgcagtgagccgtgatcacactatattcgaacctggatgacacagtgagaacctgtctcaaaaaaaaaaagaaagaaagagaaacacaaaaaagtgggatctctgtctcaaaacaaaactaagtgtaatacaggttcttggctatcttgcctactgcttagttgaatgaccaaagaaaaaaacaaatttttcagtagtctgtatgcctagaaaacctcagttaaaaaccagaggaagttaaagctgttgcctaaaaatgtgcccttgaggcagggcacggtgggtcacgcctgtaatcccagcactttgggaggtggaggtgggcgtatcacctgaggtcgggagttcgagaccagcctgaccaacatggagaaaccccatctctactaaaaatacaaaattagctgggcacatggtgcatgtggtggcacattcctataatcccagctacttgggaggctgagacaggagaatcgcttgaacctgggaggtggacattgcagtgagccgagatcgcgccattgcactccaacctaggcaacaagagtgaaactccaactaaaaaaaaaaaaagtgtccttgagaatatctttggattgatttcacctgtctatactttgcctgcttgcccttttgtgtgtataatcaataacagacttttcaaagatcaggaatgaacttttgttttttccactttttggtctctgtgaatctaaggaatgaactcttaactagagtcttgtccatatcttggtaaagatgccctctgcccttttcagttaggccgcaatgtaacaaactcagtccatgactgaatttaatctaaccagcccagtatttccttcctgggatccaccagcaccaaatataataaaacttcaatttggaagtcgggcaccacggtgcacacctgtagtcccttcggtggctgggtcaggagtactgcttgagtccgggagttcaaggccagcctgggcaatataattgggacggcaccctgtctcaaaacaaaacaaaataaaatcaccttcaagttggtcttttcttaacaactttattttttctttctccaatacctcatcttgagcattcttcttttgattaataatagcatactggtgtttggatccccttcacaaccagaaagataaaaaaagcctctcagggtagatataggaaaacttcaaatcatttcaaatagggttcctgaaatttcttggagaaaataataagctatattagaaattcagagaaaggaagaattcagagaccttggctctcggtctggcttcactaccaaatcacttaagttatttagataatcacaggccattagttttccctacttcagagaaatgctgagaccgatgttcatttaattcactggataaaaactatccaaaagtaagactatttatctttttttatctttttttttttttagatggaatttcgttcctgttgcccaggctggagtgcaatggcacaatctcggctcactgcaacctctacctcctgggttcaagcgattctcctgcctgggcttcccaagtagctgggattataggcacgcaccaccacacccagctaatttttgtatttttaatagagatggggtttctccatgttggtcaagctggtcttgaactcccgaactcaggtgatccgcctgcctcagcttcccaaagtcctgggattacaggcgtgagccaccgcgcctggcaaatatttatcttaatactggaaatgattcttgggctgaagaaacgcttgtttttgtgtgtgtgtttttttgtttgtttgttttgcttttatgtggagtctcactctgtcacccaggctggagtgcagtccaacgatctcagctcactgcaacccccacttcctgggttcaagcaattctcctgcctcagcctcctgagtagctggaattacaggcctgtgccaccatgcccagctaattttcatatttttagtagagatgaggtttcaccatgttggtcaggctggtcttgaactcctggcctcaagtgatccgtccgcctcagcctcctgaagtgttgggattacaagcatgagtcaccacatctggcccaaactcttgtcttaaccttttgtgagacgttttatgtatttacagatcatgaaatctctaatgaagtaaacttctaagatctgactaaacaaaaggaccatcaagtgttcacagaatgctaacatatagaacaaagtttaaagaagatacaaaggcctggactctaaaaaataaatgaacaattcaaatgtctggtttaaaacaaacaaaaagatggattaaaagtttgtatcggaaaggtaactttgttttgaatggttttgacaatctcatacctcctgcagtatcaaatacagtctgggtaattaattcagtggactctttcccttttactgccagactgaacagctctgaggataatctccctcactctcccagggctcagttggaagattcattatttatgccctcaattgtttactctgtcctatttttccacacgtccagcaggcccaagagctgtgttaccactggcctgtttccaaaatgaatgcattactcattgccctattagttacaaaaccaaaataatcaaacacagtggtgtcttaacgttggaaagcaaccccaccaaccatttgatctaggagagaaattaataacaatgccagcccaggttaccaaaagctaaattgtcctggatgaagagagaaccatacatcattccagtcctttattttgagccactgaacaacacacatgcatatccaacaaggattcttaaaggacagtatcattagaaagacagctctggccttcactgagaacagactgtaaactactaagggttaaactgattgagagaaaatttgcctaagcaaccattctttaggaagagttcagtaactcaccaacaataaattctacatcctcatctgagtggtaaacagattacagactccatcaagtcctctactttcaggattcagactcatagcaaacaacttcctcaaaagattcagcttccaagagtcaaaccctgggggaggggattgtgcttaaacacacaaaatattgtctctgacacctgactgaaaaagctgaaaagctaaaaactaccatcacccacatctccatatgaatgcatccattgttctaaataagtctctgacaattgacagagcattctcagagtctcctgtgcctctaatattttctcacctagagtaagcttttcccaattccaaaccttacaacactcaagctgattattctgagaatcaagcaatgccaagggcccaatatttttctttcaccttctcaaggggatcattttatacttctgatgtgaacaggggattagtctcgagtctccctttagagagaacatagagtcctttttcttaacacattccaagccgtgactcacagaaataagcaggatgggccgggcacggtggctcatgcctgtaatcccagcactgtggaaggccgaggcaggtggaccatctgaggtcagtttgagaccaccctggccaacatggtgaaaccctgtctctactgaaaatacaaaaattagccaggcgtgctggtgcgtgtctgtagtcccagctactcaggaggctgaggcaggagaactgcttgaacctgggaagcagaggctgcagtgagcagagagattgtgccactgcattccagcctgggtgacagagcgagactccgtctcaaaaaaaaaaaaaaaaagagagagagagagaaatgaaataagcaggttggataaaaacagactgctaaagaaaattaaatcaactgctttaacctcaaccagcactatgccccctcaacctaagagattatggctttctataattgtttccttgcagatgaccaaattccaggatttccatgccccttaaatgatatttgaacatcagtgcaaatacatttatgattagttctatacatagtcttctgtctcctgggaaaattctttcacgaacccctaattattgcaccatgcaaaacagtgatcacacaaatcagtcaaaaaaatagaaatatcgggcgtggaggggtgcagtggctcacaccttaatcccaacactttgggaggcctctgggagggctgcttgaggccaggagtttgagaccaacctgggcaacagagccagaccctattctctacaaaacataaaaattaaaaaatagtaatataaaaaagtgagtgaagtataactttataaagctgtacttactgctcacccatgggtagagaacataaaaaccacccagatatcaaatagaagggcaaacttgttttttgacagaagcaagttgaaattgtacagcctccaactggtttttttttgtttttgtttttgtttttttgagacagggtctcactgtgtcacccaggttggagtgcagtggtacaaccttggctcactgcaacctctgcctcccgggttccagcaattctcccacctcagcctcccaagcagctgggactacaggagtgcaccaccacgcccagctaatttttttatgttttggtagagacggggttttcaccatgttggtctttaacttctgacttcaagtgatccacccacctcagcctcccaaagtgctgggattacaggagcaagccattgcaccccgccttccaactggtttttttggtcacttccccagcttcctataccttagatatcaaagtgcactttgttttatatactagctaactctgttttatatactagctaactttgttttatatactagctaactttgttttacatactagctaactctgttttatatactagctaactttgttttatatactagctaactttgttttatatactagctaactttgttttatatactagctaactctgttttatatactagctaactgtaaaggcttcaatcagtgatttttaacagttcactctcagtagcaagttaactagtcaacatctgggggatcccctttccctcccaatttaaatacaactcatggagccttaagggacaagtgagtaataaaaacccaaaacctgacacaggattactgtgaatctactttttagtaacatgtctattctaaggtatttgaaatcttctttttaaaaaaggtaaagtaagcttcgtaatccctattactttccacagctgaaatggtttcctatcccattatccctattttttataatacttgctttcatcccaaattgctcctaattgtctagagatctaataaatcaatgcaaagaaaaaaatcactaatctagccaaaagtgtaagacagctccagtgtatcaattctgtcttcaaaagtggaccccagttacaacaatcgtgggaaactgaacctgtattacataaactctgaaccattttaattaatatttatcaaagtgttgccaaaaaaaaaaatattcatcccttttggtactgtagctctttgctaatcaacattaagataaacctgctccaaacacgtttcgttgaaaatgcccatttaggccaggcgcggtggctcacgcctgtaatcccagcactttgggaggccgaggcgggtggatcacgaggtcaggatatcaagaccatcctggctaacacggtgaaacccggtcactactaaaaatacaaaaaattagccaggtgtggtggcaggcgcctgtaatcccagctactcaggaggctaagacaggggaatcgcttgaaccctggaggcagaggttgcagtgagccgagatcgcgccactgcactccagcctgggcaacagagcgagactcgtctcaaaaaacaaaaacaaaaacaaaaaaacccccacgaactaaaatacatctggaggtttgtttttttaagtttggttttggtttttgacgatagaaactactccctccgagggtctgtgaatataagaaatataccaacagagaaaaagataagacttttaagtttcagcaacagcaaggtaagtttgcctgctctagtcaggtttctccaacagagatgagctactacacaaagccggtgacaatgtactccaggaagagactttagcagagttaatcactaacaactatcaggatttcctttaaccaccatttgactggggctgctccctctttccactagcacctcctctcctttcagattgttattgctgatcaaggcagtcccaaggaggaaaatggtgaagacaaccttaatggacacgcatggagtacagttccaaatatccactcctagcttgccttttcttttttttaaattacggtttactgcatcagataccacacaaaaaagggctcctcttttcttctctgtgcattttactatgcgaccgatatcgacacatcagtaaaaagagataagagtcctgaatctccttacccatctgcaggggtgagatgaagggaaggaaaaaaaatgatgaagggtagaaacagataatcaaaataaactgatgcgatccagagacattatttcccgttccatttccccttttcttacaaggttaagtcggctgaagtcggggtcgcgttagaaaaagcacacacacaccttgcgccctggaaaggtgaggttcgctccgcagcgctccgtggggctcctggctccgccccgcccgccttgggcagctgagcccagctcacccccgccccgggaggatggaagagagggggcttctagcggtctaggcagggggagggggaggcggctgctccgggtgccaggctcacggagcgcaggactccgcggtgcgccgacaccccctcccccagccggctgccgcttgctcccagccgccgccggaagccagccccgccccctcacctccaccctggctcttcgcgagccctctcctgtctgcacagccaatggcgagccagggagccagcagagcgactcgccaaacagccaactggggaggcccacagggaggtcagccaccgggataggcccgctacccgcggacccggcccgactcggctcctctttgttagcgctgcccccatctctcccggcccctaccccaaagccaggagccaagcatcccgtagctgggccaggtgaagctgcgcccctttgcaccccttctccctctgtccccttgtcccctcccactttctgcctgggtactaggagacccccccccacccacgcgatacctcccagagtgcctcagacttcaacagcaattgccacctggagacactcgacagtaaaaagatgctccccaagcctctctgcctctagtctaatcaactgcactgcactgtaacagtggacggatttaggattgcatattaaatcaactgcacacatcaatcctccctgtcggaaactcgtgcttcccgtgacgcagaaattaagcgggggggggggggggggggaggggggggcgttggaggcatgttgggaaagtatgtatctagaagttggtggggtggagaagggaatacatgaaatcatcagacacaaaaaaaaaaaaaacacacacatacaaaaaaaaaaaacacacatagttggctccaacctgtttcagatacaaaacatccaatgtatttagctggatgtatccaatccagttaaatcccaagataacaattcctttagcaggtttcagtacaattaggaagcaaacacctaatccttgttcagtcatatacctaatattatggggaacatactctcagcaaccagactggaggagactaagacaacatgaaaaataaatgcaatgtgtgattctgacctggatcctttttgctataaagtatataactggtataataataagcaacagttgaagaggatctgataattatatggaagtaatgtgtcaatgttactttcctgattttgacagttgtttcttttttttttgttttttttggagacggagtctcgctctgttgcccaggctggagtgcagtggcgagatcttggctcactgcaagctccgcctcccaggttcatgccattctcctgcctgagcctcccaagtagctggagtagctgggactacaggtggccgccatcacgcccagctaattttttttttttttttgtattttttagtagagacggggtttcactgtgttagccaggacggtctcgatctcctgacgtcgtgatccgcccgcctcggccttccaaagtgctggtattacaggcgtcagccaccgcgcccggcatggaataggacattttaaacactgtggtatattttctggggtgtagtgatagagcactacatggggctcatttaagaaaactggccgggcgcggtgtgtctcacctgtaatcccagcactttgggaggccaacgtgggcagatcacttgaacccaggtgttcgagaccagcctggtcaacatggtgacctggtgagaaccccacctctaccacaaattttagaggtagctaggcgtggtaactcgcacggtagtcccagctacttggcagagtacagtgagcagagaccgtgccactgcactccagcctgagtgagagtaagactctaactccaaaaaaaaaaaaagaaaagaaaaagaaaacgggggtcaggaaaggcaagctattacctagaatgtcatttttattcagcgttcttgcaagtgcataacattaaatatctacatcacactctacaacactgcttaatccccccgaacactactataatttaaaacaaaacaaaactttaaaattaagcagtctaggctaccttggaactcaaaacatttcatatataacaacctcagtactcctggaagatggaaaaggagctgtatgacatgcctgtttttattttatttatttttgagacggagtttcgctctgtttcccaagctggagtgcagtggtgagatgctgtggtgtaatcttgactcactgcaacctccgcctcctaggttcaagcagttctgcctcagcctcccaagtagctgaaattacaggtgcacaccaccacgcctggctaacttttgtatttttactcgagacggggtttcgccatggtggccaggctagtctcgaactcctgacctcaagtgatctgcctgcctcggcctcccaaagtgctgggattacaggcatgagccaacgtgccaggccgatcttttttttttttttttttttgagataagagtctcgatctgtcatccaggctggagtgcaacagcacaatcttggctcactgcaacctctgcctcccgggctcaagcgattctcctgcctcagcttcccgagtagctgggattacaggcacgagccaccgtgcccggctaatttttgtatttttagtagaaacggggtttcaccatgttgcccaggctgatctcgaactccagacctcaggtgatccacccccctcgcctcccaaagtgctgggattacaggcatgagccaccacgcccagcatcacagctattttttaaacacatataaatatacatctcttggtccaatataatatctagatgttacaccaatccgtcaacagtagttattgagagaataagaatacaggtagggagaactgaagaagagaatttattacatcttttttttttttttttaaagacagagtctcgctctgtcacccaggctggagtgcagtggcgcgatctcggcgcactgcaacctccacctcccaggttcatgccattctcctgcctcagcctcccaagtagctgagactacaggtgcctgccaccaagcccagctaattttttgtattctttagtagagacggggtttcaccgtgttagccaggatgatctcgatctcttgacctcgtaatccgcccgactcggcttcccaaagtgctgggattacaggcgtgagccaccgtgcccggcctttattacatcttttaaaaaataaaaaagcgggccaggtgcagtggctcatgcctgtaatcccagcacttcgggaggtcagggtgggtggatcacttgagctcaggagttcaagaccagcctgggcaacacagtgaaaccctgtctctacaaaaaatacaaaaattagcagccaggtgtgatgactcacgactgtaactccagcactttgggtggctgagacaggcagatctcgaggtcaggagattgagatcagcctggccaatatggtaaaaccctgtctctactaaaaaaaagtacaaaaattagccaagtgtggtggcgcgcatctgtaatcccagctactcagcaggctgaggtaggagaatcgcttgaaaccgggaggcgcaggttgcagtgagctgagatcgtgccactgcactccagcctgggcaacagagcgagactccgtctcaaaaaaaaaaaaaaaaaattaaggcacggcatggtagctgacgcctgtaatcaatcctagcaccttgggatgctgaaatagggcagatcacttgaggtcagggattcaaaaccagcctggccaacatggtgaaacctcatcgctacaattaaaaaaaaaaattagcccagtatggtagtgggggcctgtaatcccagctactcgggaggctgggacaggaaaattgcttgaacccaggaggcagagattacaatgagccaagatcatgccactgcactccagcctgggcgagtgggactccgtctcaaaaaataaataagtaaataaaaagcattaattttgtcatttttactatgttaacttagtgaaattacagattttatcatctttaaactatgttgaacatatcttttatagtcagtaaaagatactaaaacataaacatctctcaaaaatagatggaagagatcaataggctagactaaaaattagtttaggtaatatccctctagactgatcagtttgcacctcattatttcttgagcaccctattttgcaaatttcctaaatggcatttataacaaccaaaaaaaaaataaataaaatgtaactctgacacttaatttactccaatcaaaacgacacagttcccagtagaacggaataaaaaaaacaaaaaaaaacaatgattgcacccgaaaagaaggcaaacagtcttaaaaagacaatttcctcataaagaactgctacgtcatatttacagaattcaaacacccatgacacagagcatagaaactttgataaaacctttattgttcattagacttcaagagaacagtaggcctgagaaaaacactgtggtaattttttttaagggaattcctggcactatcacttcaaagtagcaaggtgtaacagtaattaaagggttttaactggctgcactttctgtttcagacactacaggggagtataaaaatccaaataaaatctgggattttgttttactcattcactaacatcatcaaatatgtactgtattcctgtatgcctgaaattctattagaccccagagacaaaaagattaataagatgtggtctttgtctttaaagtacttagtttagttagagaagacatgactgttaaaaaaaaaaatagtaataagcccggcgcagtggctcacacctgtaatcccagcactttgggaggccgagcagatggatcaactgaggtcagcagttcgagaccagcctggccaacattgtgaaaccccatctctactaaaaaatacaaaaattagccgggcgtggtggcacatgcctgtaatcccagatactcaggaggatgagataggagaatcgcttgaacctgggagacagagattgcagtgagccgatatcgcaccactgaactccagcctgggcaacagagtgagactctgtctcaaaaaaaaaaaaattaataatcataataaggccaggcacagaggctcacgcctgtaatcccaacactttgggaggccgaggctggactacctgaggtcaggagttcgagaccagccaggccaacatggtgaaaccctgtctctactaaaaatacaaaaaattagccggccatggtggtcgcctataatcccagctactcgggaggctgaggcaggagaatcgcttgaacccaggaggcagaggttgcagtgagctgagattgtgccattgcactccagcttgggcaacaagagtgaaattccatctcaaaataataataataataggcaaactacaacagagaatgcagagtagagaatcaaacccatgactttgggagactatggatatgggacaggacagaaggagaatcattcctagaagagagaggaaaaacatgtgcctatatataataattcacactagacaaaccagcctatccaaattggctttttctcctaataacaacatttctggccttaatctaaatggaaataacctatacctagatggtatctttaaacttctatctatgaaagtagaagcattatctggtaaagaagatttgctaaaataactagttggttaggcttcaaaatctattgcatgcagtttaaaaggcatgaaggtggggtgtagggggtggtttatacttctagctacttgggaggctgaggtgggaggatcatttgagcccaggagtaagagttcaaggttatagtgagctatgatcgtgccacagcactccaagcctcagtgacagagcaagaccctgcctttaaaaaaataaaaataggccaggcgcggtggctcacgcctgtaatcccagcactttgggaggccgaggtgggcggatcacgaggtcaggagatcgagaccatctgggctaacacggtgaaaccctgtctctgctaaaaatacaaaaaattagctgggcgtggtggtgggcacctgcagtcccagctacttgggaggctgaggcaggagaatggcgtgaacctgggaggcggagcttgcagtcagccgagatcgcgccactgcactccagcctgtctccagggcgacagagcgagagtccgtctcaaaaaaaaaaaagaataaaaataaaaaataaaaataaaaataaaaataacaagactctataggaatgactgataaaccagaattaaagctcaaagtcacgacaagggtgccaaagggaaacacttgtatggtatatttttccctaatcttcaaaatgactgctccatcatttatggtttaggatgtttgggttgtatgttctgggagtagagagctggaaagaaggggcaagttgttaatttttcatactgatggggtagcacatggtagaaaaagtaaaaagccaaaatcctgaaaaagtttcacacacatagacaaaatgagacagcaaacttgtgaatcgagcatgatttggcatctttaaatgcacagccaattcccttctagtgccaaagccaatggcttctcctgtagataaaatggcacggttcctgaaaaagccctggacgctgtttccccacaatcctataatctgtcagaagacagaaaacaaaaagaaggctgtgcaagccagaaaaagcaaattataaccaacacagagccaacactttacttcagacagaaggagcttttctatgcatctttggaaaggaagagacaaaagaagcttaccattgctcaaataatcaaggcaaacaataaaacaatttaaccaaacaccatctgggattagcattcaatgcaatagcctcccttctcacttcttattcatagccttaaggaatactaacatcacataaaaaagagttgaatgccacaatatacaaagaactcttataactaaataagaggaagacaaataaccaaaggggaaaatattcaaagaatatgagatagtaaatcacagaagaaatacataaagtcaaaaattatatatatattccattttgttaggtagtggtggaaagtgccttctccatacagtcctaaaggcattttgtcttgatagtactgccaactgcaagcttccagagaaacttgggctattttgaatgaaaaaaataatgataaagatgtcaagcataagtaatacattcctaaaaatatttagaagttttatgaaatacctaatctaggaaggaaactattcaatataatggatacatataagctacaaattaaatccaagagaactaaaatatgaatataaaatgaacctttgcctatgaatgtaaaacagttgaagccaatccctaagcctagaatgaacaaagctgatgatgaaagcaaataacagggagtcttactacaaccacagaaataaaacgtctctaagaaaataaaattactcaactgtctttgctgtgaaagcatgtcattcaaggacccttttagcagtcaccaaatgcaaatgcaaaagcagataatgcctgagtccagcaaaagcaagtacagtcttcccatcaaagaggaaaagaaacctaagcctttcacttgtccttgatacaaaaaggtaaatggattgtgaaagaactcaaattccagaaaaaaagattccagtccaacctgcataaagctaaaaaaacttcatgttactttgttctaaaattagcaacacacaggtccctatactaaaaacaatatatacgatcccaggtgaggtgtcagggtaaagttcccagcacgtcagcagactatcccataaccatttcagttttccctttttggcttttagacaacatcccaattttcctctattgttaatgtcacttaaaaggctgagaaaaatttagttcaacagattcaaatttcaatgtagttcctaagtacattacaggtaatgatgccactgattctatatttagactctggtatggaacaaggagtgttagttttgtctaaaatggtaccatgtcactcttcaaagcctaactgcaacaatcacctaatcctgcattaaaatgtctttaaggtgttacctatagcaagttaaaatgttttttcagtgtcttttgtgtgtgagtgtttctattgattggctgtgatgctataaatatagacacaataagtcactcccatcaggcctttaaacattcagcaatgcaagtaccataaggtggaattcattcctcatctgaaccaaaaagcaaaaatggtaaaactttttttttttttttgaggcgaagtctcgctctgtcacccaggctggagtgcagtggcaagatctcggataactgcaacctctgcctcctgggttcaagcaattctcgtgccttggcctcccgagtagcgggaattacaggcgcctgccaccacgcccagctaattttttaaaatatttttagtagagatgggttttcaccatgttggccaggctggtttcaaactcctgacgaccttaaatgatccacctgcctcagcctccaaagtgctgggattacaggagtgagccactgcacccagtctggtaaaactctttttattttatttttttttttttgagatggactctcgctctgttgccaggctggagtgcaacagtgcaatctcggctcactgcaacctcccccacctgggttcaagcgattctcctgcctcagtctcccaagtagctgggactacaggcacgcgccaccacacccagctaatttttatatttttagtacaaacggggtttcaccatattggccaggatggtctcgatctcttgacctcgtgatccacccacctcggcctcccaaagtgcgggattacaggtgtaagccactgcgcctggccaaaactctaataatatgaacattctaaagtgatctaatagtacttataaaaatatattgcctcctcaaaaggaatttaaggcctctcaataaaaagcatgttgcttattttcacaacatcccaataaagaactattatttagcatttatatcacactttaacttgcaaaagtgttttacaattattttcattagtagtcatgcatcacaaccacccaacaagccaaaatggtcctgttatcctcatttgacagctgagaaaactgatgtactttaagaacaaggtcaagtcagtctgcttttcttatagaccaagggcctaacccttataaaaagtctcattcgctcaccagttacctgtattgctcataaaagtagttaaagcaggtttttggaaataggagtccatataaaataatcgtacagggccgggtgagaggtggctcatgcctgtaataccagcactttgggaggctgaggcaggtggatcacatgaggtcaggagttggagatcagcctggccaacatggtgaaaccccatctctactaaaaatacaaaaattagctgggcgtggtggcgcatgcctgtaatcccagctactcaggaggctgaggcaggagaatcgcttcaacctggggctgggcagaggttgcagtgagccgagattgcaccattgcactccagcctgggcgacagagcaagagtccgtctcaaaataaataaacaaataaaataaaataatggcacaaaaacactgaaagatactaattcaacaaaaatacatagtcaggctgggtgcagtggctcacgcctataatcccagcaatggtgcgatctcggctcactgcaacctcccccacctgggttcaagcgattctcctgcctcagtctcccaagtagctgggactacgggcacgcgccaccacacccagctaatttgtatatttttagtacagacggggtttcaccatactggccaggatggtctcgatctcttgacctcgtgatccacccacctcggcctcccaaagtgcgggattacaggcatgagccaccacgcccggcctaaaagtattttttaaaaaggccaggcagcacagtggctcacgcctgtaatcccagcactttgggaggccgaaggcaggtggatcacctgaggtcagaagttcaagaccagcctggccaacatggtgaaaccccgtctctactaaaaatacaaaaattaagctgggcgcagtggcataagcctgtaatcccagcacttttgggagactgaagtaggagaatcgcttgaacccgggaggcggaggttggaaagagccgagattgcaccattgcactccagcctgggcaacaagagcgaaactccaccacaaaaaataataataataatacaaaattagccgggcatggtggcaggcgcctgtaatcccagccacctgggagactgaggcagagagaactgcttaaaacccaggaggtggagattgcactgagctgagatcacgccactgcactccagcctgggcgatagagcaagactccatctcaaaaaaaaaaaaaaaaaaaaaaaaaaaaaaatatatatatatatatatatatatatatatatacacacatatatatatatacacacacacatatatgaatatagaattagccaggcgtgcttccatgcgcaggtagtcccagctactcaggaggctgaggcaggagaatcacttgaactcggggcagaggttgcagtgagccaagatcacgccactgcactccagcctgggcaagagactgagactccatcttggggggaaaaaaaaaacatattcaactggaatacaaacaggtaagtacttagttacaatgacacaggaagttttcaaggaaactgggtgccaaaacctgttaccaaacaaaaacaaaaaaaatgatcaaatgtttcttcatcttatttttccccctcaatcaactacaattagacttctatttccaccactccaatgaacggttctactggaagtcaccaataatccctaggttgtcaaatcctgtgagtacttctctgttacgtgacctctatatagcattcaacagagctcaccactccgttctattttttttttttttttgagaaagtgtctagctctgtcacatggagtgcagtggtgcaattaggccggagtgcagtggcacaatcaccacttactgcagcctcaaccttccagactcaagcaattctcccacctcagcctcctgaatacctgggactgccataggcatgtgccaccacaaacagctaattttctattttttgtagacacaggatcttactatgttacccaggctgaccactcccttcttgaaacacttctttacttgccttctaaaacatcactttctgggttttccacctatctcactagctattccttctctttcaaattgctcttctctagccacaaaccatctgtagatgacctcctgattaaataccatgacttcaaattctatctatttcagctcagaattctcctaggaatgccaggcatttctatccaactgcctatctaatttctccatttggatacctaacaagtatctcaaacttggcaggaccaaaagagaattttttttttttttttttttgagacggagtcttgctctgtcgcccaggctggagtgcagtggcacaatctcggctcactacaagctctgcctcccaggttcatgccattctcctgcctcagcctcccaagtagctgggactacaggcgcctgccaccacacccagctcattttttgtatttttagcagagacagggtttcaccgtgttagccaggatggtctcgatctcctaacctcatgatccacccgcctcggcctcccaaagtgctgggattaaaggcgtgagccaccacgcccggccgagaattttttttttttttttaattttagacaagttatcactctgttgccaaggctgaagtgcaatggcacaatcacagctcactgcaacctccaccccctgggctcaagccatcctcccacctcagcccctcaagtagttgggaccacaggcatgtactaccacacctggctaattttcttatttttttgtagacacagggtctctctatcttgccgaggctcgtctgaaactcctgggctcaggtgatcctcttgtctcagacccccaaagtgctgggttacaggcatgagccaccactgtccaagaatttttgacaattatattctgctagtcttacccatatcaattaacagcaacaaccatttacctccctggttgctccagtcaataatatagaagttatccatgattccttattacctcacttccaaaggtgtaacaatcccaaagcaagccctgtcaacttcacttccaaaagatatgccaaatctgtcatctttccacagcttttataccatcaccccagtccaagttaccataaagtctcatttgattcgtgcaaagagccttgttactggtctccttgcttccttctacaacccatttctttttgaggtggagtttcgctcttgttgaccaagctggattgcaatggcatgatctcagctcaccgcaacccaggttcaagcaattctcctgcctcagcctcccgagtagctgggattacaggcatgtgccaccacgcccagctaattttgtatttttagtagagatggggtttctccatgttggtctggctggtctcgaactcctgacctcggtgatccgcccgccttggcctcccaaagtgctgggattacaggcgtgaaccactgtgcccgcactacaatccatttctaacatagcaactgaacattctttctagtcacaaatcgactcatatcatactcgtacttaaaaactccaaaggaggctgggtgcagtggctcacgcctgaaatcccagcactttgggaggccaaagcaggtgaattgcctgagcttaggagtttgagaacagactgggcaacatggtgaaatctggtctctaccaaaaatacaaaaaaaattagccggacgtagaggcgtgcacctatggtcccagctacttgagaggctggggtgggaggatcccttagcccggtggtggaggttacggggaaccaagattgcaccactgcactccaacctaggtgacagagtgagatcccgtctcaaaaaaaaaaaaaaaaaaaaaacactccaaaggaaacgaaacaccttaccctagcttccaaatctcactgtcacctagcctctgcctttgtcatctcgtcattctctccctcattcaccgtattcaaacaacactggcctgatttctgttccttcaacataccaagctcattcctccttaggtgttctgcactataatgtttgatctgctgatcttcatatactcctagatcttaaatgccatatccttagagagatattctcccaatataaagtagctatcaattcatactatcacatcctctatttttctgtacagtgtttatcattaactgatttttatttattttgttttatttttgagatggagtctcgctctgtctcgcaggctggaatgcagtggcgcgatcttggctcattgcaacctctgcctcctgggttcaagaattctcctgcctcagcctcccaagtagctgggattacaggcacccaccaccatgcccgcctaatttttgtataaaagtagagatggggttttgtcatgttggccaggctggtcttgaactcctggcctcaagtgatctgcccacctcggcctcccaaagtgctgggattaccgtgcccggccattaactgttttttttgttgtttttttgagactgagtcttgctctgtagcccaggctggagtgcagtggcacgatcttggctccctgcaacctctgcctgccggttcaagcgattctcctgcctcagcctcctgaatagctgggactacaggctcatgccaccacacccagctaatttttggtatttttagtagagacagggtttcaccatgttggccaggcttgtctcgaactccagacctcaagtgatctgcctgcctcggcctcctaaagtgctgggtttacaggcataagccacccacgcccggccattaactgatttttaaaaagctgtctgttgctggacaggttggctcacgcctgtaatcccaacactttgggaggccgaggccagtggatcacctaaggtcaggagttcatgaccagcctgactaacatggtgaaaccctgtctctactaaacacaaaaaaaacagccaggcgtggtggtgcatgcttgtaatctgagctgcttgggaggctgagacaggagaatcgcttatacctgggaggcagaggttgtggtgagccaagatggcgccattgcactccagcctgggcaacaagagcagaactccgtctcaaaaaaaaaaaaaaaaaaaaaatctgtttgttgtctgtttgccctcattggaatgtaagctccataacagcagggactttgtctatcttgttttgtgtactgccaatgctgaaaacatagtagaaactcaatacatttggcaggcttagttgttaggtgctgaagttaaaaaggtgaaaaagggccaggcactcaccacctgtaatcccagcactttgcgaggctgaggtgggaagatcacttgaggccaggagcttgagaccagcattggcaatatagcaagaccttgtctttgccaaaaaaattttttttttcattagccaggcacagtggctagtgtctattgtcctagctacttgggaggctgacacgagaggatcatttaggcccaggagtttgaggttgcagtgagctataacagcaccactatactctagcctggtggagaattaaactctgtctcaaaaaaagaaaaaaacagcctggacaacatattgaaaccccatctccacaaaaaattttaaaaattaacttgcacgctggcttgcatctgtagtcctagctacttgggaggctgaggcaggaggattgcttgagcccaagactttagaagctgcagtgagctatgacagtgccatggcactccaagcctgggtaacacagtgagatcttgtctattgaaaaaaaaagaaaaagtgaaaaaggaataacccctacctacaaaaagctcacaatccagatgaggaaacagaatagcaattaaataataaatgtaaggaacatgcattctatttaatagaatgagatgctgtcatttaaacaatgtaaaaaataataataaaggtaatgttagcaggatagtaaaatgtcagagtagcccatcagcaagagtgattaatactgccttgggaacagggaagacttcacagaagaaattaactatgagctaaatcctaaagcttaattaggagagtcttagttatgtttgttcagataattgtttatgtttgtctattttggaagaaatgtccttggaagaaaagaaaatagcttgagcaaaaatataataaagtgaggaaggaagatggaatcaagcatctgctatgtatcaggcactagggtaatgaagggctttaaagggaaagggcataagtagtcttacaacttaggaagatcattcttgtggcagtgtggtggacagactagaggggtgataagccttgagacatgcagattagttaggaggctactgtaactgtcagagttaagaaataaaaaaggtctcatccaagaatttggcaatatggtataaatgaaaaaatgcagatttaggagaacttcaacattaaaatcagacctgggaccaaccagatatgtcggataaggggtaaggagaaatcaagatcaaatccaattttttttttttttttttttttttttttttttgagacagagtttcactcttgttgcccaggctggagtgcaatggtgcgatctcggctcacagcaacctccgcctcccgggttcaagcaattctcctgccgcagcctcctgagtagctaggtaagagggaaaccttgtctcaaaaaaacaaagtgagctgggcacagaggctcacacctgcaaccccagcagtttgggaggctgtggtgaccagatcacttgatcccaggagttcacgaccaccctgggcaacatggcaaaaccccatctctaaaaaaaaatacccacaaaaaattagccaggcatggtggcgcaccatctgtagtgccagctactcaagaggcttaggtgggaggatcgcttgagcccaaaggcataggttgcagtgaactgtgattgtgccactgcactccagcctgagctacagagaagactctgtcacgaaaaaaaaaaaacaaaaaacatacaactgcatttctaagtaaaataaattcaaaaggatttaaattttctagacttttcacttttaattatgtaaaatgtattaaaaaagaaaattaagctaaaaattcaaatgtatttagggaattacatttctggaattagtctttaaagtctctcttctctgccccagacaaaaataacattcttttattgttcagttctaagagttctcataaatgcatagttgtgtaaccacaactacaatcaaaatacggaacagtcatgtcacccccaaaaaatttcctcatactacctctttgcagtcaactctctacttttttttttttttaattgagacggagtctcgctctatcaccgggctgaagtgcagtatggcgccatctcggctcactgcaacctccgactcccgggttcaagcgactgtcctgcctcagcgtcccgagtagctgggactacaggtgcgcgccaccatgcccggctaatttttgtatttttagtagagatgggatttcactacattggccaggctgatctcgaactcctgacctcgagatctgcccgcctcggcctcccaaagtgctgggattacaggcgtgagccatcacgcttggccaccctctctctactctttttttttttttgagacgtggtttcactcttgttgcctcagctggagtgcaatggcgccatcttggctcaccgcaacctccgcctcccgggttcaagctgcgccaccacgcccagctaattttgtatttttagtagagacagggtttctccatgttgctcaggctggtctcaaactcccgacctcaggtgatccgccccaactcggcctcccaaagtgctgggattacaggcataaaccactgcgcccggcccactgtctctctagtcttacccaaaggcaatcactgatctgttccccactgtccttatagttgagttttccccagaacatcatacaaatgcaatcatacagaccatagccttttgagttttgtttcttttactaagcataataccaatgagtttcattcatgttattgcatatatgaatagttcctttttattgctgagtagtattccattgtgtagatacattagtttgtttatccattccccagctgagagtcattcaggttgtttccagtttgtggtgactataaataaagctgctgtaaacagtcacatacaagtttttttgtgaacacagatttttatttcacttggataaatacttaggtcattttttttaaatttttttttttgagaccgagtctcactctgtctcccaagctggagttggagtgcagtggcgcgatctcggctcactgcaaccttcacctcccaggttcaagaaattctcctgcctcagcctcccgagtagccgggactacaggcgcaagccaccatgcctggctaattttttgtatttttagtagagatgaggtttcactgtgttaaccaggatagtctccatctcctgacctcgtgatccacccacctcggcctcccaaagtgctgggattacaggagtaagccacttcgcccagcctctttatacattcttttttttttttttttttgagagcgtgtctcactctgttgcccaggctggagtgcagtggcgcgatcttggctcaccacaagctccgcctcccaggtttacgccattctcctacctcggcctcccaagcagctgggactacaggtgcccgcaaccacgcctggctaattctttgttttttagtagagaagcggtttcaccgtgttagccgggatggtcttgatctcccaacctcgtgatccagctgcctcggtctcccaaagtgctgggattacaggtgtgagccaccacacccggcctatacattcttaatatgagctgtatgtctgatacataattggcgaacatttctcccagtgtgttgcttatattttcatctacttgacagtcttctgcaaagcaaaagtttttaattttgatgaaatccaatttatcaactttttatttttatggatcttgcttttggtgtcatatctaagaactctttgcctaactcaatgtaataaggattttctcttatcttcttttaaatctcatagtttaggccgggcatggtggctaacacctgtagtcccagcactgtggaaggctgaggtaagcagatggcttgagcccaggagtttgagaccagcctgggcaacatggcaaaaccccatctctattaaaaaaaaaataaaataaaataaagttaaaataaaataataaaaatattttataattttacaaattacatttaggtgtaattgttgagatgactattctttctccactgaattgcctttgcacctcggtcaaatatcaatagccatacttaatagtgtgaatgtttctttttttttttttttttttttttgagacggagtctcgctctgtcaccttggctggaatgtagtggaatggtctcggccactgcaacctctgcctcctgggttcaagtgattctcctgcctcagcctcctgagtagctgggactacaggtgctcaccaccatgccccactaatttttgtatttttagtagagatggggtttcaccatgttggccaagctggtctcaaactcctgacctcaagtgatcccccacctcgacctcccaaagtgctgggattacaggcataagccaccgtgcccggcctgaatctatgtctgaacctctgttctgttcattgatctatgtatctatccttctgccaataccacactgtcttgattactgtagctctttattaagtcttgaaatcagatagtatgagtcttccaactctgttgtcctttttcaaaattgttttggctattttagtccctttgcctttccatataaattttagaattagcttgtcaaaggcttttttttttttttttttttgatacagggtctcactctgtcacccaggctggagtgcagtgttgcgatcttggttcactgcaacctccgccttctgggctcaagcaatcctactgcctcagcctccaaagtacctgggattacaggtgtgagcaactatgccaggctaatttttgtatttttttgtagagatgggatttcaccatgtttcccaggctggtctcgaaccctgggaactcctaggctcaagcaatacacccacctctgcctcccaaagtgctgagattacaggcatgaaccaccatgcctgaccatgtcaaagactttttaaactttcccacaaagtgtctacttttaagtaggggttagcttcctagatttacttaaagaaaaaaacaatgctgggccgagtgcagtggctcacgcctgtaatcccagcactttgggaggccgaggagggcagatcacaaggtgatgagatcgagaccatcctggctaacacggtgaaaccccgtctcaactaaaaatacaaaaaaattagccaggcgtggtggcaggcacctgtagtcccagcaactcaggaggctgaggcagaagaaaggcatgaacccgggaggcggagcttgccgtgagccgagatcgcgccactgcactccagcctgggcaacacagcaagactccatctcaaaaaaaataaaataaaaataaaaaataataaagaaaaaaacaatggaggtattaggaggattagaaatctaatatctatttttcaagattctaaagttttacttgcacagctgttctgagatttcctgcagttgtccagaagaaaagaaaaatgttttatttaaagatatgtattattgtttagtacaacagagttgaaaacccatttttcataaaagacaagctattcattccaaacagataaaatgttaagcttcttgcactttacaaacaatggtccctctgctgccaatgatcttcctctgactcttcacctaaatcgtacacatccttcaggtcttactttggacaatcctccatgcacaagccttccttgattctccccaaatatgggttaagggttaacatatttccattacaccctaaagacctctatcatcactcttaactctataattgagagttaacttgtttctcccatcaggacataaactctgggtatgaaggagaaaacactaaatatttacattttagctcctagcagagacagagaaatacataagtctgttttgaatgaccaattgctttgaataacagcaagaagggggagaagttgaaaataggatgtcctaccttgcaaacaagctacaaaaagaatcctccaaaaaagtggaaagtgataccagttaaaaaagaaaggctgggcacagtggctcacacctaaaatcctagcactttgggaggctgagccaggaggatcacttgaggccaggattttgagaccaccctgagcaacacagttaagactctgtctctattaaaaaaaaaaaaaaaaaaaaaaaaggaaaggggccaggcacggtgactcaggcctgtaatcccagcactttgggaggctgaggcaggcggataacaaggtcaggagttcgagacctggtgaaacctggtctcaactaaaaatacaaaaaattagccaggcatggtggcacgcgcctgtagtcccagctacttgggaggctgaggcaggagaataccttgaacccaggaagtggaggttgcagtgagctgagatggccccactgcactccagcctgggcaacagagggagactccctctcaaaaaaataaataaataaataagttccactgggcatggtggctcatgcctgttatcccagtattttgggaggccgaagcaggtgcatcacctgaggtcaggagttcgagactaccctggccaacatggtgaaaccccgtctctactaaaaatacaaaaattagctaggcgtggtggtgtgcgcctgtagtcccagctacttgggagaggcaggagaattccttgaacccaggagactgaggttgcagtcagctgagatcgtgccactgtactccagcctgggcaacagagtgagactttgtctcaaaaaaaaaaaaaaaaaaaagaagttcacagaaaaaaaaaattgaaaaataaggaaaaggactagcactgtactatgaagtagtagttgtcatgccacattcctgcaaaactaatctctcaaaaagatacgaatgaacaacatataaagcaactgaagcttggactcacagagtcatcaagctgactttcactactaatatgctaatgactactaaatctgtatctcccttctgaacctttctactcaagacctaggtatatctggaagcctattggatttcccagatacctcaaatcctatataccaaaatcaaacttatttccttcaaatgtaataccctcttttactcttgtattccgtaacttggttaatgacatcacattccacttagttgtccatgccagcaatttcaactccatctttgacaactccttcttctttacccgtcctccaatataaagtcaatgagatccttttagttactctcctaaaaagttctccaatcagtctacaattccaccatgactactgtacctgatttcgtcaatctctcaagtcatcacaccattctcccaaccaactagtctccctacaatcaattgtgccttttaaagtctaacttctatactgtcaacagagttacttctacttaaatagtgatctaaacatgttccttacctggtttaaaaactcttccatgactcctcagcacctacaaaataaaattcagaccccttactaaggtcatccataactggattccaacccatctctcacctcactttcttctactccttcctcataccccatgatcctgccacattaaactagtccacatgtccatacttcttgcacatctgtatctttgtacaagctattttctgcacttcaaacagtaacttttccaatccttttttttgctgactcagccaaattgtattcctccttcaagacccaactgactctttctctaggaagtcttctctaactttcccctcccactacaaggcagaactaatgttcccatagcacttagtacagatctctattacagcacttattgtactgactcagaactatttatgtgttggtctctaattaaaatgtggctggtccgagtgcagtagtgtttacaagtaattgatataagaagttacaaatttctttgttgcttcttcattcccactgcttcacttggctagccttaaaaaaaaagaaaaaaagaaaaaaaaaaagtcaattttttttttttttccctgagatggaatctcaccctgttgcccaggctggagtgcaatggcgtgacctcagctcactgcaacctatgcctcccaggttgaaacgattctcctgcctcagcctgctgagcagctgggattacaggcgcccaccactacactcagctaattttgtgtgtgtgtgtgtgtgtgtgtgtgtgtgtgtgtgtgtgtgatggagtcacgctctatcgcccaggctagagtgcagtggcgtgatctcagctcactgcaactttcacctcccgggttcaagcaattctcaatcctagcctcctgagtagctgggattacaggcacctgccaccacgcctggctaatttttagtagagacggggtctcaccatcttggccaggatggtattgaactcctgacctcatgatccgcccacctcggcctcccaaagtgctgggattacaggtgtaagccactgcatctggccaacagtgaactctttaaaaatgattttgtcatttatattttaattccctcccagcgcctagtacaagacataacacatggtagacacttaaatatttgctgaagttgactgctgaaaggatcaactccaacattttttcaatgaggccacagaatccaaaaagcttacgattcaagcctagttatggcttactggtagaaaaaaagacattacacaaattcgcaaattgatacttatgttgtttctagatttgcatatttttcccaactagtttcagggttagttcccagaaaattggtaaccaagtaaatcttttaaacaaaacagttttttgttgttgttttaaatagggtctcactctgtcgcccaggctggagtgcaatagcgagtttacagctcagattactgctcactacatccttcatctcttgtactcaagtgatcctcccacctcagcctcccaagtacctgggactataggtgcatgccaccacacccggctcatttttttttatttttttgtaaagagagggtttcaccttattgcccaggctggtctggaactcctgggctcaggtgatcctcctgcctaggcctcccaaagtgctgatattacaggcatgaaccaccatgccaacttaaatcacttcttatttttattatatatttttttcagagtctccctcttgttgttgcccgggctggagtgcagtggcatgatctcggctcactgagacctccgcctcccgtgttcaaacaattctcctgcctcagcctctcaggtagctgggattacaggcgtccaccaccacacccagctaatttgtgtgtttttagaagagatggggtttcaccatattggccaggctggtctcaaacccctgaccttgtgatccacccgcctcggcctcccaaagtgctgggattacaggcataagccaccgcgcctggccctaaatcacttcttaaatgacctatattttcccatgaaatagtatgatccagtgttgtaccaaaccaccatttaataattgagccagcatacgcctgtaatcccagcactttgggaggccatgaggcgggcttgtagcaggacaagccacagacaaaacccctcagatgctgagttaaagaaggaagggctttattcggccgggagcttcggcaagactcacgtctccaacaaccgagctccccaagtgagcaattcctgtcccttttaagggatcacaactctaagggggtctgcgtgagagggtcgtgatcgattgagcaagcagggggtacgtgactgggggctgcatgcaccagtaattggaacggaacagaacaggatggggattttcacagtgcttttctatacaatgtctgtaatctatagataacataacctattaggtcaggggtcgatctttaactaccaggcccagggtgtggcgccgggctgtctactggtggatttcgtttctgccttttagtttttacttctttctttggaggcagatattgggcataagacccatattgggcataagaggggtgggctcctcccttaagctgatcacctgaggtcaggagttcgagaccagcccagccaacatggcaaaactccatctctactaaaagtacaaaaattagccaggcatagtggcgggcacctgtaatcccagctactcaggaggataaggcaggagaagcttgaacccgggcagtggaggctgcagtgagccaagatcgcacccctgcactccagcctgggtgacaagagtgagactccatctcaaaaagtaaataaataaatacataaatttaaaggccaggtgcggtggctcacgcctgtaatccctgcactttggaaggctgagacgggtggatcacgaggtcaggagatcgagaccatcctggctaacacagtgaaacctcgtgtctactaaaaacacaaaaaattagctgggtgtgttggtgggcgcctgtagtcctagctactagggaggctgaggcaggagaatggcgtgaacccgggaggcagagcttgcagtgagccgagatcgagccactgcactccagcctgggcgaccgagggagactccgtctcaaaaaaaaaaaaaataaataaataaatttttaaaaaaattgagccagcaaatctgattacccctccttgtattaaatgcatctgtaataaagaaaatttagtatttttcttgttaaattgtagtccttttcactataagtcacagagctttgacagggaaacaatcgagaccctgagaggtaataagacagaaatagatattaaatacttctttttgtttttttttttttgttttttgagacggagtctcgctcgctgtttcgcccagggtggagtgccatggcatgagctcggctcattaccacctccacctcctggattcaagcgattctcccgcctcagtctcctaagtaactgggattacaggcgggtgccaccatgcccagctaatctttgtatttttagcagagacggggtttcactttgtttgccaggctggtcttgaattcctgacctcaaatgatccacccacctcggcctcccaaagtgctaggattacaggagtgagccaacatgtccgaccaataattttgtttttaaatagaatgtttttaggccggatgcagtggctgacgcctgtaatcccagcactttgggaggtagaggcgggtggaacatttgaggtcaggagttcgagaccagactggccagcatggtgaaacaccatttctactaaaaatacaaaaattatccgggcagtagtgccatgcctgtaatcccagctactcaggaggctgaagcaggagaactgcttgaagcaggagaactgcttgagccagggaggcagaggttgcgctgagccaagatggcgccactgcactccagtctgggcgacagagtgagaccctgtctcaaaaaaacaacaaataggccgggcgcggtggctcacgcctgtaatcccaacactttgggaggccgaggtaggcagatcacaaggtcaggagatcgagaccatcctggctaacacggtgaaacctcatctctactaaaaatacaaaaaattagccgggcgtggtgacgggcacctgtagtcccagctactcaggaggcggaggcaggagaatggcgtgaaccttggaggcggagcttatagtgagccgagatcgcgtcactgcactccagtctgggcgacagagactccatctcaaaataaataaataaataaatagaatttaaaaacaaaaaaaagatttttggctgggcgcggtggctcacacctgcaatcccagcactttgggaggccgaggcaggcggatcacctgaggtcggcagttcgagactagcctggccaacatggtgaaacgtcatctctactaaaaatacaaaaatcagccaggtatggtggtacgcgcctgtaatcccagctactcaggaggctgagaccagagaatcacttgaacacaggaggcagacgttgcaatcagctgagatctcgccattgcactccagcctgggcaacagagtgaaacttggtatcaaaaaaaataaaataaggccgggcatggtggctcatgcctgtaatcccagcactttgggaggctgagtcgggcagatcacaaggtcaggagatcgacaccatcctggctaacacggtgaaaccccgtctctactaaaaatatgaaaagaaattagccaggcatggtggcgggtgcctgtagttccagctactagggaggctgaggcaggagaatggcgagaacccgggaggcggagcttgcagtgagccgagatcgcgccactgcaatccagtctgggcaacagagcaggactccgtctcaaaaaataataataatgataataataagccaataaatatttattttagcccctggtatgtcagagattcacaggaagtccttaaatctccaaagttcctctcccactttagaaaaacttctcacacgaaaggcaatcaagatactagcccacccctttttcttccccagggaaagaaatcctcattttgtaaggtcatttactacataaaagtaaccacaagtaggaaagataacagaaggagaggaggacaggaaattctcatcacagctgaacaaacctctattattttaacataacatgggtggcatttatgcgcttatttgaactgatggaaatttccagtagggggaaaaatgcattaccaacattaaaaataaatgtccaactattaaaaaataaaataagatagctatgcccagctttaacattttatactctactccatgtagtagtcaaacatggaataaatttctgtaatgacctatcacaatagtaacaaatgctttatttttaaaactattatcttaaacaaagtattatagacaaataatctattgggacggtcaaggaactaaagtaaaaaggttaaaattatacatcactgtgcatttccaggaaagaaaagtgaaacacattttaccagacagagaagttaaaaacaaccaggttcatttttcccattcctgtaaattcactccccttatttgtgaatcttcaagaatctagtatagcccctccctacctttactcaggtaaaagaccaatcactcatcaattgccaaaacgccttgacagtttaaggtctcaatcctcagagtcagcaaagctgaagtgtctatgtccttttaaaaggagtctgcatctctactttagaaaccattttctcactgcgcttggtggcttacgcctgtgatcccagcactttgggaggccgaggcaggcggatcacctggttcgaaaccagcctgaccaaaatggcgaaaccccatctctactaaaaatacaaaaactagccgggcatggtggtgggtgcctgtaatcgcaactacttggaggctgaggcaggagaactgcttgaacccgggaggtggaggttgcaatgagccgagattgcgctactgcactccagcctgggcgacagaacaagactctgtgtcaaaacaaaataaaataaaaagaacccattttctctttccataaacacatagtttgtcctctgctttgtctacattaaaaaacacgtctcaggagtgtttcttcagcctctcaggaaaaccaagacacctcttgggctcctcttctgagatattccacctgagagatcccactgacaagcagggtaacaaaaagcagagctagagggctgccttatgcatatctgacctccaaaacagcgacaggtccccggagcagccagagactcctttgcaaaggagaactttttataatttaaaaataataaaatgggccaagcacggtggttcacgcctgtaatcccagcactttgggaggctggggcgggcggatcacctgaggtcagaagtttgagaccagcctgtccagcaatggagaaaccccgagtgtactaaaaaaaatacaaaaattagccgggtatggtggcacgtgcctataatcccaggtactagggaggctgaggcaggagaattgcttgaacccaggaggcggaggttgcagtgaaccaagttcgcaccactgcactccagcctgggtgacagagcaagactccttcacccacctcaaaaaaaattataataaaataaaataaaaataaagataacaaaatagccaggcacggtggctcacgcctgtaatcccggcactttgagaggccgaggtgggtggatcacctgacgtgaggagttcaagaccagcctggccaacatggtgaaaccccatctctactaaaactacaaaaattagccaggcgtggtggtgggcatttgtaatcccagctactcaggaggctgagacaggagaatcgcttgaacccgggaggcggaggttgctgtgagccgagatgatgccactgcactcctgcctggcgacagagcgagactccgtctcaaaaataaaataaaatataataaacaaattatattttcacatccctcactgggcagccctcccagcttgtctcaaactagttttcttaactcttttttccagacggagtctcgcactgtcacccgaactggagtgcaatagcactatctcggctcaccgcaacctctgcctcccgggttcgagtgattcccctgcctcagcttcccaagcagctgggattacaggcgcccgccaccacacccggctgattttttgtatttttagtagagacgggatttcactacgttggctaggctggtctccaacttctgacctcgtgatccgcccgcctcggcctcccaaagtgctgggattacagacatgagccactgcacccggccttttctcaactcgttaaagcacattagtgccaactgtgttataaggcaacatgagttagctatgttcagaaaatattttaatagattggccctccatcctttcgggtgaggagctgcaaaccgtttgtaaaaacgccggagtacggtatttttcctacagaagtctgatggctaatttatcacattacagaactggtagttctgcacatggtctgctgtgcccataaagaaagcacatatgtgtctactgaggttttacaaacaatacgcttcttatcttaacagagaaatcagtcattccattaacaacggtaaggtctaaattccactaacattgttggtgatacattaacatcaacatagtacttacaattcacaatttgcataaacaatctcaattacataggtgatgcttgcaatagcccgtttgaagcatgacatcttcctggtgttcagaaaggttaagtgggacctgcccaaggttacctaacagctttatcaatggtggacttcctttcgaacctgcctgactctaagcccctagctcttttccctagacccctcccggctttcaaaagagggttcccgactcccatcctctacccagagcagcctattactccgggagaccgacccttcccctgcctggttcagaggtggcttcttaagctccagcagagctttcatcctccaccaccctccccccgcaatcattctctgaaagaagcggaaaggagaggcgaccaaaagctcctggaggaagggatgatacaaatgggctgcttcactccacagcacgcaaccccgtccccctccaccaagctgtccagctctgcggccggcgaccgggccacccgtgccccaaattctcccatcatcacctcaaactgtacctcccccacgcccttccgtctcccacagtcagagcccaccccacaaagtcatgtatccttccgctaagttaccctcttcccacgcgttgtccactccccctccaccactactcacggtcggtgactgggcccggccctcatggctgctcctttgccgcccgccgcccgccgccaccacttctccactgcccggcccctcagtcaccggcgcagctgtggggactacccggagccgctcctgcgcctgcgcagcgtgtagcgcctgggccctttcgggccgcacgcgcctgcgcagcccctgccgggggcgtcttcctcagtgcctgatggtctggacccctgggtctctagtggacatgggagctggccttgaagaattctgaggcttagagaatttggcggctgcctcagggtacgcctctggagtaccgtgcctaggttactaaacccttggatcgcgcttccccaaggagccacagacttactggctcttccagaattctgcatcctacttgcacttaaaggcctgaattcaggtgctctgaggtgaccactgatgataaatttgggtctttttttttttttttctgagtcgaagtttcgctcttgttgtccaggttggagtgcaatggcgtgatctcggctcaaacaacctccgcctcccgggttcaagcgattctcctgcctcagcctcccgagtagctgggattacaggcatgcaccaccacgcccagctaattttgtatttttagtagagacggggttttatcatgttggtcaggctggtctcgaactcccgacctcaggtgatccacccacctcagccttctaaagcgctgggattacaagcatgagccaccgcgcccagcctgggtcttttttttttttttttttttttgagacggagttttgctcttgttgcccaggctggagtgcagtggcgcgatctcagctcactgcaacctccgcctcccgggttcaaacgattctcctgcctcagcctcctgactagctgggattacaggcttgcaccaccacgcctggctaacttttgtatttttagtagagacggggtttcaccatgttggccaggctggtctcgaactcctgacctcagatgattcgcccgccccggcctcccaaagtgctgggattacaggcctgagtcaccatgcctggtaaaatttgggtctctttcaagatgatcgtgtctagaatgtatcgggggtaattatgtaaaggcagctttgccatcctagaatacgctactagctaggaggtgcaatgaagtcctggggaccttgtcaaggaggtgacctcgcctagaatgcactggggacaccgctaagttcagtatgtttatcaagcacatgctgtttattggacagaaatgttctaggcatcgcgtgtatgctattgaggaattcgcaggcaaatagtcccctgctttccagctctcactgtgagcctggccctttttcaaactggtaaaagaaaaccactaaagtccagtgaggcccaactgtcagtccctagactactgtgctgctttggcatagcctgacaagagactaagctcaatcgagtcctgagaattcaacaaaacagacttgaaagcagcaggcaagaggaggtacaggactaaactctctcctcatcaccatggctcttttttctctctcaactccagcgctggtctcctctcttcagagtttggacacataaggcccaagatacaacgtaagggggaaaaagagaagaaaaaaagacaagttgagtgctcaatgaggaatgttaaaaaaatttaaataggccaggtgcagtggctcacgcctgtaatcccagcactttgggaggccgaggcgggcggatcatgaggtcaggagatcgagaccatcctggctaacacggtgaaaccccgtctcactaaaaatacaaaaaattagccgggcgtggtggcgggcgcctgtagtcccagctactcaggaggctgaggcaagagaatggcgtgaacccgggaggcggagcttgcagtgagccgagatcaagccactgcattccagcctgggcgacagagcgagactccgtctcaaaagaaaaaaaaattaaaaataaagctgggcatagtgacttatgcttgtaatcccaacattttgggaggccaggttgggaggattgcttgagcccaggagttagagaccagcctgggcaacatagggagactcatctctacaaaaaatctaaaaaatagtggccaggcaagatagctcatgcctgtaaacccagcactttgggaggttaaggcgggcggatcacttgaagccaggaattcgagaccagcctggccaacacggtgaaaccctgtctctactgaaaaaatacaaaaattatctgggcatggtggcatgcacctgtagtcccagctactcaggaggctgaggcaggaaaatcgcttgaacccaggaacggaggttacaatgagccgagatcgcaccactgcactccagcctggataacagagtgagactccatctcaattaaaaaaataaatagggccgggcgcggtggctcaggcctgtaatcccagcactttgggaggtcgaggtgggcggatcacgaggtcaggaaatcgagaccatcctggctaacacggtgaaacctcatctctactaaaaatataaaaaattagccgggcatggtggcgggcccctgcagtcccagctacttgggaggctgaggcgggagaatggcgtgaagcccggaggcagagcttgcagtgagccaagacggtgccactgcactccagcctggggacagagcgagactccatctcaaaaaaaaaaaatacaaaaatacaaaaaaattggctgggcgtggtggtgggcgcctgtagtcccagctacacgggaggccgaggcaggagaatggcatgaactgggaagcggagcttgcagtgagccgagatcgcgccactgcactccagccttggcgacagagcgagactctgtctcaaaaaaaaaaggaaaaaaagaaaaaataaataaataggccaggcacagtgggtcacacctgtaatcccagcactttgggaagccgaggtgggcagatcataaggtcaggagatcgagaccattctggctaacacggtgaaaccccatctctactaaaaatacaaaaaattagccgggcatggtggcgggtgcctgtagtcccagctacttggggggctgaggtgggacaatcaattgaacccgggaggtggaggttgtagtgagccaagattgcgccactgcaatccagcctgggtgacagagcaaggctccatctcaaaaagaaaaataaataaataaataagggttgggcctggtggctcacgcctgtaatctcagcactttgggaggccaaggcgggtggatcacgaggtcaggagatcgagaccatcctggctaacacggtgaaaccccgtctctactaaaaatacaaaaaattagctgggcatggtggcgggcgcctgtagtcccaggtacacaggaggctgaggcaggagaacggcgtgaacccaggaggtggaggttgcagtgagccgagaccatgccactgcactccagcctgggcgacagagcaagactccatctcaaaaaaaaaaaaaaaaattagctggatgtggtggtgcacacctgtggtcccacctacttgggaggctgaggtgggagaatcacttgaacccaggaggcagaggttgcagtgagcctagactacactacaccgcagcctaaggaaccgagtgagactgtgtctcaaaaaaatttttttaattaaaaaaaaaatgttcaggccaggtacggtgactcacgcctgtaatgtcatcactttgggaggtggagtaggcggagtttgagaccaagctgggccacatggtgaaaacccgtctgtacaaaaaaattaccaaaaaattagccgggtgtggtggcccgcatctgtagtcccagctacttgggaggctgaagagcgaggattgcttgggtctgggaggcggaggttgcagtgagattcaaccattgcactccagcctaggggagccagactccatctcagtaagaataaaattttcctcttaaaaaagaaaagaaaatcctctattaaccccacagccctctcctgctcaatattggtcctcaatatccaagggttcagcatctaggaattcaaccatccgaagaacaaaaatatctggggaaaggccaaacgtggtgtctcatgcctgtaaactcagcacttggggaggccaaggcagaggaccatttgaggccaggagttcgtgaccagcctgggcaacgtagtgagactctgtctctgcaaaagatttaaaaattagcgctgggcgtggtggctgacgcctgtaatcccagcactttgggaggcctaggtgggtagatcacctaaggtcaggagttcgagaccagcctgaccaacatggagaaaccccatctctactaaaaataccaaattagccgggcatggtggaacatgcctgtgatcccagctactcgggaggctgaggcaggaaaatcgcttgaaccccagaggcacaggttgcagtgagccgagatagtgccattgcactccagcctgaacgacagagactccgtctcaaaagaaaaaaaaaagaaaaagaaaaaatctaaaacttccgtgaccccaagttacaaggtgtaactttatcttccttactaaaatagtgtagtgggccgtgcgtggtggttcatgcctatagtcccagcactttgggaggctgaggcaggcggatcacgaggtcaggagttcgaggccagtttggccaacatggagaaaccccatctctactaaaaatacaaaaaattagccgggcattgtggcggaagcctgtaatcccacctactccggaggctaaggcaggactattgcttgaatctgggaagtggaggttgcagtgagccgagatcgtgccactgcactgcagcctgggcgacagagaaggactctatctcaaacataaataaataaattaattaaataaagaaaaacaaggccgggcgcggtggctcactcctgtaatcccagcgctttgggaggccgatgtgggcagatcacgaggtcaggagatcgagaccattctggctaacatggtgaaaccccgtctctactaaaaatacaaaaaatgagccgggcgccatggcgggcgcctatagtcccagctactccggaggctgaggccggagaatggtgtgaacccgggaggcggagcttgcagtgagccgagatagcgccactgtactccggcctgggcgaaagagcgagactccgcctcaaaaaaaaaaaaaagaaaagaaaagaaagaaagaaaacaaaatagtgtagtgaagatgaaggagagagaagcagatggagcctgcgcatgttggctcacatctgaaatcccaacactttggaaggctgaggtgggtgacttgaaccctagagcggtgtctggcacatagcaagtactcaatagatttttgttcaggagcgaataaatgacatctttctctgggttggctctccccttctggtatcaacatgactgcagcagctccagatattatgtcttcttacatccagctccagtgggaaagaagcaaaattctccttgtacgttttatctccctgggttatgtgcccatctctaaaacaatcatcatgggctagagaatgttatacgctgattgagttggttccgagttgtgtgctccttgcctggggtgagcctcatccaaccacatggtctgagtttgcagtaggggtgtttctatggataactatattgtatataatgaattaatgattggcaggggaaaaatccactattctgcccttggtaagaaattcaagtaggggcccgggcacggtggctcacgcctgtaatcgcagcactttgggaggctgaggaaggtggatcacgaggtcaggaattcaagaccagcctggccaaggtggtgaaagtgtgtctctactaaaaataaaaaaattagccggtgtggtggtggctacctgtaatcccagctacttgggaggctgaggcaggagaatcgcttgaaccagggaggcggaggttgcagtgagccaagatcgggccactgcactctagcctgggcgacagagcaagactgtctcaaagaaagaaaaaaagaaattcaagtagggaaatggctcagaagacccgcagtggttcaaatataggaatatatgttgttgtcatatagtctccagcagggggcgccaccttcccctctcccctgggagccaagagtctagactgggccaccagcccatacccctagtcctggcagcactgattccccaccagaactgagctcatgttaagtgggggatgacccggccgggcgcggtggcttacgcctataatcccagcactttgggaggccgaggcgggaggatcacgaggttaggagatcgagaccatcctggctaacatggtgaaatctcgtctccactaaaaatacaaaaaattagccgggcgtggtggcgggcacctgtagtcccagctactggggaggctgaggcaggagaatggcgagaacccgggaagcggagcttgcagtgagccgagattgcgccactgcactccagcctgggagacagcgagactccgtctcaaaaaaaaaaaaaaaaagtgggggatgacccaagaaagcactgtaattgacacttagcgattttctactcttcggacccggggccatggagccttgagtagagttgttttttttaaatcagcatatcaacttattttctcttctaccccaattccttccctgctattctctacactccaggaactcaccagcagggagcaggccgcagctaattttggtaccacttaagggttgcccattctggccccccttctactctctcaccctcaaatctttgtatctggagtgttttcttccaagaagctgcaacacccaaggttggtaactctcataaccaacccacacaagcgcccacctcctctttaggaagtggccaaatttggcatttttttcattacagcctgccattcctagatgttttctacattaaagaagaagaaaaaaaatcactgttttctccttaacttcaagctaccactctctcctctttccctataagggaagagaaaacaaaaagttgaaatgtaaaaattcccctcctcaccaggcgcagtggctcacgcctgtaatcccagcactttgggaggccgaggagggcggatcacctgagattgggagttcgagaccagcctgaccaacatggagaaaccccgtctctactaaaaatacaaaaaattagccaggcgtggtggcgcatgcctgtaatcccaactactcaggaggctaaggcaggagaatcacttagaacccaggaggcagaggttgcagtgagccgaggtcatgccattgcactccaacctggccaacaagagtgaaactctgtctcaaaaaaaaattccccctcctcccattatttaagctattgtcctattgtcatcactctcttctctgccccataaagctgtgaagccctttgcctcactcttgatagcatgaggggccagcgggcagggattgcgatttgaatttctgaactgtttttccttccactctgggtacttgctcaggcattggagtctcctcacccttggccatatgagtttctttttttttttctttttaagacagagtcttgctctgtcgcccgggctggagtgcagtggtgcgatctcggctcactgcaagccccgcttcctgggttcacgccattctcctgcctcagcctcccaagtagctgggactacaagtgcctgacaccacgcccggcttttttgtatttttagtagagacagagtttcaccgtgttagccaggatggtctcgatctcctgaccttgtgatccgcccacctcggcctcccgaagtgctgggattagaggcttgagccaccgcgcccggccggccacatgagtttctttagaatcctttggtcaactgggaccttgattttgaaacagtttagtctcgggtatttttgttctgtttgttctgtttgtaggttctgtctgtttgcctattttcttctgtctgtcggtttttgttgttttcatcattgtggttctagaaacttctcgtgtgcagtgtctgaccaattttgaacaggttctttctataaaaatcaaaaattgtaaaaaaatgttccgccaggcatggcagctcacacctgtaatcccaacgctttgggaggccaaggtgggcaaatcacaaggttaggagtttgagacaagcctggccaatatggtgaaaccccgtctgtactaaaactacaaaaattagccgggcttggtggggtgcgcctgtaatcccacctactcaggaggctgaggcagaagaattgcttgaacccaggaggtggaggttgcagtgagctgagatcgcaccgctgcactccagcctgggcgacagagggagactccatctcaaaacaaaacaaaacaaaacaaaaaaatgttccaaggctaggggcagtaactcacacctgtaatctcagcactttgggaggtcaaagcagatggcttacttgagcccaggagttcaagaccagcctgggccaagccaggcatggtggctcacacctgtaagcccagcactttgggaggccgaggtgggtggatcacctgaggtcaggagttcgagaccagcctggccaacatggtgaaaccccatctctactaaaaatacaaaaaattagccgggcgtggtggcagaagactgtaaccccacctacttgggagcctgaggcaggaaaatagcttgaacccgggaggcagaggttgcagtgagccaagatcatgccattgcactccagcctgggagtctcaaacgaacaaacaaacaaacaaaagaccaacctgggcaacatggtgacagcctgtctctataaaaaatacagaaattaggctaggtgcagtgactcatccctgtaatcccagcactttgggacgccaaggcgggcagatcaccgggtcaggagtttgagaccagcctagccaacatggcgaaaccctgtctctactaaaaatacaaaaattagccagtgtggtggcgggcacctgtaatcccagctactcgggaggctgagccaggagaatcacttgaaccagggaggtggaggttgcagtgagctgagatcgcaccactgcactccagcctgggcaatgagaaagactccatctcaaaaaaaaaaaaaaaaccaaaaacagaaattagctgggcgtggtcaggcacatctgtagtcccagctacctgggaggctaaaatgggggaatcacctgagcccaggaggtggaggttgcagtgcgccaaaattaaaccactacactccagctcagacaacagagtgagactgtggctcaaaaaaatttttttttaattaaaaaaagcaacgtggcctggcgcggtggctcacgcctgcaatcctagcactttgggaggccaaggcgggtggatcacgaggtcaggagatcgagaccatccaggctaacacagtaaaacaccgtctctactaaaaatacaaaaaattagccgggcatggtggtgggcgcctgcagtctcagctactcgggaggctgaggcaggagaatggcctgaacccgggaggcagagccaagatcgtgccactgcactccagcctgggcgacagagcgagactctgtctccaaaaaaaaatgttcaggccaggtacagtgactcacgcctgttatctcagcactttgggagatggagtaggcagagttcaagaccaacctggaatacatggtgaaaccccatctgtacaaaaaaattaccaaaaaattagccggatgtggtggcccgcatctgtagtcccagctacttgggaggctgaagagggaggattgcttgggtctgggaggtggaggttgcagtgagattcaaccattgcactccagcctaggggagccagactccatctcagtaagaataaaattttcctcttaaaaaagaaaagaaaatcctctgttaaccccacagccctctcctgctcaatactggtcctcaatatccaagggttcagcatccaggaattcaaccaactgaagaaaaaaatatctggggaaaggccaagcatggtgtctcatgcctgtaaactcgcacttggggaggccaaggcagaggatcacttgaggcaaggagttcgtaaccagcctgggcaacatagtgagactctgtctctgcaaaagatttaaaaattagcactgggcgaggtggctgacgcctgtaatcccagcgcattgggaggttgaggtgggcggatcacctgaggtcgggagttcaagaccagcctgaccaacatggagaaaccccgtctctactgaaaatacaaaattagccgggcatggtggtgtatgcctgtgatcccagctactcgggaggctgaggcaggaaaatcacttcaacccgggaagtagaggttgcagtgagccaagattgcaccattgcactgaagcctgggcaacaagagtgaaactctgtctcaaaaaaaaaaaaaaaaaagaattactaggcatggcagcggcaggtctgtagtcacagctactagcagggctgaggtgggaggaacgcttgagactgggaggtcgaggctgtagtgagccatgattgcaccactgcactccagtctgggtgagagagcaagaccctgtctcaaaaaaataaaaataaaagaaagaatgggagaagagaaattgaggatagccagaatatacagtggtgtcttcccagggaatttagataccataatttccaccctcccatcctatggataccaaaatctgctgattctcttgtagtaagagatgactttaagtcatcttaaagtctctagattacttataatatctaatacaatgtaagtgctatataaatagttgttatactgtattgtgttgtatttttgttgctattgttattttagagatggggtccctgaaatcccgtgatagagatttctgtctgttttgttcactgatgtattcccagcacaggacagagcttgctagtggatgctttatacatcttcctccatagtcaggcatgttagcatgtgcctgtagtcctagctactcaagagggctgaaactggaagatcgcttgaacccaagagtttcaggctccagtgagctatgatcatgccactgcactccagcctgggtgacagaatgagcactgactctaagaaccttccttcctcaacaccccctctaccaaagtttatctctgtttcttttttttttttttttttttgagatggagtctcgctctatcgcccaggctggagtgcagtggtgcaatctcagctcactgcaagctccgcctcccaggttcacgccattctcctgcctcagcctcctgagtagctgggactacaggcgcccgccaccacgcccggctaattttttgtatttttagtagagaccgggtttcaccgtattagccaggatggtctcgatctcctgacctcgtgatccgcccgcctcggcctcccaaagtgctgggattacaggcgtgagccaccgcgcccagctctctgtttcaagtgtttgatttagaggctacaaaggatgaagagggctcaaggcctcaaacagagcaaggtaaatgagtttctccggctgctagagcggtctaggagaccttaggtggctaagccacttcttcctcctttgcaaaccctctggttgttctccataaaggaatgacctcagatagtagacagtagccaaggcttacaggagggaaatccagacctgctcttcatcccaaacaccgacccaaggaccactccttccaggaacctagcctaaagcaaaggtgcagacagcccggggccaccgctgacctctagggcaagccaaattaaggctgggagaggatcctgcaggccaaaggatggaaaggactaggaacaaacaacaacaaaacccttacggggacaggcggaacagtgccccctcccactcccacaaccattcctccctcgatgggaggacgatttctgctatttggcctcatgggaaatgtagtcttttaggagacatggccagaagggccgtttacaaaactttggcagaagaaaaaaatacgttgtgtatgggagtccaaaactaccgtcatgcttgcacagactctaaatacacattttcccctttccttagcctccaccagtctccagagcaattcctcctcccgcccacatcccatgtgtctcggctttcaatttgggcagacctacctctctcctactcgctggttcgtcagccgctctgttcaatcgtaggagcgctcctggtcggttcccgcagtgccttgcggctgtaatggctgcccccagctggcgcggggctaggcttgttcaatcggtgttaagagtctggcaggtgggccctcatgtcgcgagggagcgggtgatccctttttcctcactcttaggcttccaacggaggtgcgtgtcctgcgtcgcggggtccgctttctctggtccccgcttggcctcggcttctcgcagtaatggccagggctctgccctggaccacttcctcggattctctcagcccgacagttcggtgactccttgcgtccccgcggtgtccatgaacagaggtaaagcgccctgataggtttgctcggaactgtcatgtttttagtattgaaaggtttctggggatactgtctttgattctattttatagaaaacaattttgaggccctgacagggaggagcagtgaaaaatctctcaggagagaaataacagtttgagtgggagaaggaaacgatctggtcacaaccagagacgctcactaaagagcatgagattgaagggccacaaagtggaactatggctctgcaccccgacatgggaagcaaatttgatccagtaaatgcatgttgggcctcatcttcttgttaagacacagttacacctggaaaacagcacactttattcttcaaacagtgtccggtattggagactggacacaaactggtcattgcaaaatggtgtcataagaagataatataaaaagactgggccctctcccttcttgacccttagcccttcctcccgtccctccttcaggaaaaaaaaaaaaaaagactgggaaagcttgcagggccttcatagcacccttagtagggtgagagaatgagagctgaggaaatatctggctttgtgtaatccagcttgctttcatgtacattcacttctcaggcacagctatacattataattacatgcagtaattattaagtgccaggtattgtgctgagttgttttacacaattgctagtcatcaaaaaaattataagctggtaagtaggtactgttaatatcaactcacttttacatatgagaaaactaaagggctcagggagttactttataaattaatgtaaattaagggccaaagtctcaaagtcagctctaggtgacttcaacctggtgcactaattttgtacccctgctccctttgtgggtgggcaggaacaagcacttgacaggaaatccagattccactgtgtctcatgcttcttcccacttgcacatagatgagcaggatgtcctcttggtccatcaccctgatatgcctgagaattcccgggtcctacgagtggtcctcctgggagccccgaatgcagggaagtcaacactctccaaccagctactgggccgaaaggtatgctacacccttgaccatcctaccctttacatcttttacttcttgccatgccttcaaggatggtcttggagggatctgggacctcactgagactcctttgttcctggcaggtgttccctgtttccaggaaggtgcatactactcgctgccaagctctgggggtcatcacagagaaggagacccaggtggtgggtacctacaaagggagtccttgaaacaggacagagggtgaagctaagagggtctcccttaccatcagccttgaagaaaatgatggtcacattcatttatgtgaggaaagggggtttcttttctttttctttttttttttttttgagatggagtctcactctgtctcccaggctggagtgcagtgacgcgatcttggctcactgcaagctccacctcccaggttgacgccattctcctgcctcagcctcctgagtagctgggactacaggcgcctgccaccacacccagctaattttttgtatttttagtagagatggggtctcactgtgttagccaggatggtctcgatctcctgaccgcgtgatccgcctgcctcagcatcccaaagtgctgggattacaggtgtgagccactgcgcctggccaggaaagggggtttcctcttcctttaggcatggtacagttctgtctctaccttgccctcccctgacatctagtcagaaagatttcattctctcgctctctttttttttttttttgagatggagtttcactcttgttgcccaggctggagttcaatggcatgatctcagctcactacaacctctgcctcccgggtttaagcagttctcctgcctcagcctcccgagtagctgggactacaggcatgcgccaccacgcccggctacttttgtatttttagtagagatggggtttcaccatgttggccaggctagtctcaaactcctgacctcaggtgatccgcctgccttggcctcccaaagtgctgggattacaggcatgagccaccacgcccagccgatttcattctctgtttactgcttcctaatcttccttatattcacagtcatcatctttctcccagatcccatcaaagcagaatggtagaaacctaaggtcagcctgggcgcagtggctcacgtctgtaatcccagcactttgggaggccaaagcaggcggatcacttgagatcaggagttcaagaccagcctggccaacatggtgaaaccctgtctctactaaaaaaatacaaaaattagccgggtgtggtggtgcacgcctgtaatcccagctactcaggaggttgaggcaggagaattgcttgaacccgggaggcagaggttgcagtgagctgagattgtgccactgcactccagcctggatgacagagtgagactccgtctcagaaaaaaacaaaaaacaaacctaaagtcaataatagtttgactgagaagggagggcaggctcctgacatcacaggtagcctctctctgacttcccagtcataatcttttctcctggggtctgggtatctcactttcctgattttagattctacttgacacacctggcattatcagtcctggtaaacagaagaggtaatggtggtggaattggggtggattggcggggaggtactgaaagagggtggggagattccattataggggctggaaaacccctttaccataccacatccctcatcagaaatgccttagtcataagacctttcctgactgatgtatgtctgtccctcaggcatcacctggagctctctttgttggaagatccatggaagagcatggaatctgctgatcttggttaggttcaggatgggaaccttaagcccagtttacaggggtcatggcctttcattccttggtagtttggggggcaaaagccaagctcataccatggaagtttttgtcagggcaggaggaagagtgaccatttccttttccttcttcctgccttgccatcttctagttgtggttcttgtggatgtctcagacaagtggacacggaaccagctcagcccccagttgctcaggtgcttgaccaagtactcccagatccctagtgtcctggtcatgaacaaggtgagcactacccacctgaggaaggggtctacttccctccaagtcccctatctctgaccacacaccctttgcccatcccccatgtccaggtagattgtttgaagcagaagtcagttctcctggagctcacggcagccctcactgaaggtgtggtcaatggcaaaaagctcaagatgaggcaggccttccactcacaccctggcacccattgccccagcccagcagttaaggacccaaacacacaatctgtgggaaatcctcagaggattggctggccccacttcaaggagatcttcatgttgtcagccctaagccaggaggacgtgaaaacactaaaggtcagttagtcttggccatagcctggcccttggtttctaccatatgaagacagccctcaaatttcctcctggaagcaaaagtgaggagaaaagtcctggttgggattaagatgcccatctattccctctgttcccacagcaataccttctgacacaggcccagccagggccctgggagtaccacagtgcagtcctcactagccagacaccagaagagatctgtgccaacattatccgagagaagctcctagaacacctgccccaggaggtgccttacaatgtacagcaggtacagagtgaagggttctgggggctctctatcagacacacacctctacccaggtgtatgactgactaatcatttgtctccctgtacagaagacagcagtgtgggaggaaggaccaggtggggagctggttatccaacagaagcttctggtgcccaaagaatcttatgtggtaagtgagactaggctcagaggagagatcaagactatgttaggcaggagttcttcccccagcttggagccctgagagcaggaccatatccttctctctttttttcttcttcttttcttttttttgagacagtctcgctctgtcacccaggctggagtgcagtggtgtgatcacagttcactgcagccttgacttcccacgctcaagcaatcctcccgcctcagccccctgaggagctgagaccagctgattataattttctttttttttttttgagacaaagtctcactctgtcatccaggctggagtgcagtggcgtgatctctgctcactgcaacctccgcctcccaggctcaagtgattctcctgcctcagcctcccgagaagctgggattacaggtgcccaccaccaagcccagctaatttttgtatttttagtagagatggggtttcaccatcttggccaggctggcttcgaacgcttgacctcaaattgtccgcccacctcagcctcccaaagtgccgcctgactatccgctaatttaaaaaaatttttttgtagagaaggggtttcaccatgttgcccaggctggtctcaaattcctgggctcaagcagtccatgcaccttggcctccgaaagtgctgggattaatatgcgtgagccaccacatctaaccctctcttttttttatttttttattttttttttgagccaggttcttgctctgtcactcaggctggggtgcagaggcacgatctcagctcactgcaacctctgcctcccaggttcaagtgattctcctgcctcagcctcccaagtagctgagattacaggtgcccgccaccatgtccagctaattttttgtgtttttagtagagacagcatttcaccatgttggccaggctggtctcgaactcctgacctcaggtgatctgcccgcctcagcctcccaaagtgctgggattacaggcgtgagccactgcgcccggccaccctctcttttttttaaagaggggtcgcactgttacccaggctggactcaaactcctgtgctcaaaggatcttctcaccttagccccccaagtagctgggactacaggcatgtgccatcattcctggcttccttctctttcacataccctcagaaactcctgattggtccgaagggccacgtgatctcccagatagcacaggaggcaggccatgacctcatggacatcttcctctgcgatgttgacatccgcctctctgtgaagctcctcaagtgaccaccctctactgaccctcccagggcattccagctcaagctgctggcaggaactgaccagttctgtccttggctggggaccctccaggcactggtgagagacatgaacactgactggccactagctggcctggccctgttgagtctgcacagtccctgcccagctgtgtcttctgttggaagaaggaacctgccttagctcagtttccaggtggttcctctgcctggcaccacagctacaaaggtgtagctaagaagatggcccattggtgggagcaatgtcaccctgcctccagctagctatgggcccagagtttctccctgagtcgctgttgctagcagggagatttctcttcctgccctcacttctttcaccttgaacttggataagaactcgtgtctcctgagtgaggtagcgcctcccatctgctccccaattcttgatctctcccaccccatccctctccccagtcttggatactaataaaatataagcattctggttctcatctttattccttttatttatttatttttattttttaatattagggactgagtctcactatgttgtctaggctggtctcaaactcctgggctcaagaaatcctcctgccttggcctctgaaagtggtgggattacaggcgtgagccactgtgcctggcttatctttatttctttacaacaggaaagagaaaatgtatctattccctcccctacccccaatcccacgcccccacccctgccttgtttgagctggagtctcccttccagtagtctgcttcagggtcctgagttctcttcctggcacgttttctgggtatagcaagagaaccattaccattactaaactcagtaatggtaacggtttccttgccattcccaagtgccctggcagtcagtaggttgtgacaggctgagcagagagcttcttgggcttgcagcatctctcctgtcctccttgtcaggctccagagctgggggtgcccggactagtacatcatctatactgtagtgtctcatcgcaaacttacagtatatgatgatatcccagccagggccccactgggggcacaggaagcatggcttgaaaagcactgtgaggggctgggggcagaacaggacaggtcagggctggacacacacagcttcctgctccctgctctacagctccctcgcaggccagcgtctccttgattctgtggtcaggcacagcccaggtgggttatgggaaggggactggagctagggtctgttaagatctcatagggacccagggccagtgttaaacaagccagagatggcgtaatgatgcagaaggttccctttggtcacactaacaagcagacaggcagacagacccagagaaggtgcacttacctggagctggaactgcagactgaggaggcctttggatgcagggaggatctgtccctcaagctgcttgccttttatcataccggtccctcccctgggtggggcacttttcctggccctgcctcttaacccttgccctgctagagtccatgacaagggtcactggcccctttccctagaaggccttttctcacatactctctcatggaccatattcacccttcactcccatctccaagaagctcatcatctctgccgggctgggaaggagaaagaacagcctcatcccatccaccagcatttaattgctggtcagatccctagtggaaggtttctcgtttttgctttttttgtttttgtttttgttttgcagtggtggtaggcaatgttagttgaatctctctgtatagggcaggaagggtcctggcaactggatctccagaatctgtctggcagccgagctcaccctacccgtcagcctaaatttctattcccagcccctgcccctgtgtttatgatgagcccaaggaggccagacctaggcaggcagagagactctgcctagcactgccctggcaaggtcctcttgggggttgctctactaggagatttgagagcagctgaatccccagctcttgtgggtctgctcttcaaagctcaaggcacctccagtgagagcctagcactgtttggttctttgcctctggggtagaggagaggctcctcaaagcaaggcctctgctgtttagaatccccattctgggggacacgcccttccctcttccctatcctagacaatctggtctgtgtgctggaaggcagttaatactcttcctctgcgggggtagactagaccaggatggaagtgggagaagagacccaaccttttctgggtcctgtggaggtgttctatttcctgaggtcacagcacgctggcacatgctctaccctctgcttagcatggtcttccctcctttcttgtctagttagctcctagcccctcttcagagctctttttttttccttccttttttttgagacaatttaactctgtcacccaggttggagtgcagttgtgtcatcatggctcactgcagactccctgggctcaggtgatcctcccacctcagcctcccaagtagctgggactacaggcgtacaccaccacacctggctaatttttgtatttttagtggagatggggtttcgccatgttgtctaggctgctctcaaactcctgggctcaagtgatccgcccacatgggctcccagagtgctgggattacaggcgtgagccaccgcaccagcctccctcttcacatctctaagtgttacttctgcagggaagtcttcccagactatttaagtctccctgatagggacttatttatttgtgtgattattcacattaagtaaatagtcatgagggccttgtttattcactaatatatttctgtgtttttgtttttgttttttgtttttttttagcgagagtcttgctctgtcgcccaggctggagtacagtagcataatctcagctcactgcaacctccgcctcctgggttcaagcgattctcctgcctcagcctcctgagtagctgggactacaggtactcgctgccacgcccagctaattttttgtatttttagtagagacaggctttcaccgtgttgcccaggctggtgtcgaactcttgagctcaggcgatccgcccgcctcagcctcccaaagtgctgggattacaggcgtgagccactgcgcccagctcactgatgtacttctatcacataattaacaactaaataaatgttccagcctacatcaagctgagcctaatgtaatatgggggaggagagagaccttggcctgaggaggcagatggacaaagctgtggctctctcaggcaagccattttctctctgggaccctccctgttcttatttgtaaataggaataacaatagtccccagttcacagagttgccagatctaggggatcagctgctggtgccggtcaacagaaggggttcaaacaagttcattcccacctcaccccattccctcagggacccccacaaggcctgtccttgaacatctgaaagcccatggaatattattgaaagccacctgggaccattgcaagaacccaggtctagaggtgacaggtcccaagtgacagtctcagctgtgctgcatccagctctgtgactttggaccaagtgttcccactcacagtttcctcaaatttaaaatggcagctgtcaataccaaccttatacagtgatgaagagggtgatacgagcactcatctcaagctcccagatcaggtcctagcacatatgaaacaaatgtcagtttccttctttacttctttcttctgtctcacaaactgtgtgactggggacaaattgcacttctctgagctttggtggttatacacatcttgccaagttgtaagagtcaagtcagaaatatgagtgagagcccaggcatggtggctcacgattgtaatcccagaactttgggaggttgaggggggcagatcacttaagcccaggagttcaagaccagcctgggtaacatagtgagaccccatctctactaaaagtacgaaaaaaaaaaaaaaaagaaaacaaattagccagttgtggtggcatgtgcctatatagtcccaactacttggtgggctgtggtgagaggatcactttagcctggaaagtcgaggctgcaatgagccatgtttgcaccactgcacttcagcctgggtgacaagagtgagactctacctcaaaaaaaaaaaaaaaaaaagaaaaagaaatatagaaagatgagtgagggccaggtgcggtggctcacgcctgtaatcccagcactttgggaggctgaggtgggtggataattcgaggtcaggagtttgagaccagcctggccaacatggagaaaccccatctctactaaaaatacaaaaaattagccgggcgtggtggcagcaccagtaatcccaactactcgggaggctgaggcacaagaattgcttaaacccaggaggcagaggttgctgtgagccaagactgcaccactgccatctacgctgggtgacagaatgagactccgtttaaaaaaaaaaaaaagatgagcgacaaagcttctgaaatccagctgctctaaccaggtgaggcattgtcgttatgtctgctcctgcttcccctgaccccctttcctgtcctgtgtccctcctgcgaggccacctctactcagaaaccccacagacagctcaagctccttcaacaaaggcagggcttcgtgtactagggcaagcttcatgccacttacttcctagacttctgcctagtgcctgggggccaagtccaaaggtgagcatgggcagaacctaggcgtcctaaagggaaaggggagagattatctcagccagccagagatcctgtggctgtggcctctggccaggggtggggattgctgtgagtagggtgtgggttggaggagagtctgggcctgggagggatagtcagggggccctgataagcagacattgggctatcagggtgggggcccagcagccttctgtttatcaggagccaacacgggccaaagcagggctgaggcgcttcccgcccagggctgttttcctggatatttgttcttccattcctctgcctccccagtaccccacagggagttggaatgtgaatccctctgcctctctgcaaggcacatggagactctctggccagtacaggggtgggaggacaccagctagggccttgggcctgacttttaaattctgacagcttttgcttcaaaccaggagctccatggcttttctgaggccagtgaggcaagtctggggacttcgtccttctaacttcaacccctgccactgcagctttaagctcttgactgttctttaggtcttttttggaagaagtcctaaagtgtatggtgatgaagttaaggatggtcagatctgtacaggtccttcaaaatcatggagttcaagtctcccatttatataggagagaaactgaaggcagagaggaggagagaattgtccaaagcttaagggttccctccacctctcagcatcggagaacaatgcatgactcagaggaacaggaagcagccatagacactcacagacagatacacataatatgcaaaacacacacatacaaatgcacacatgtgcactgcccacatgtacgcagacatacaacacatagagatacacagcatacacattaaaaaaagaaattcaggccgggcacagtgactcatgcctgtaatcccagcactttaggaggctgaggcaggagggtcgcttgaacccaggagttcagactggccacagcaacatagcaagacctcatctctccagaaacatttaaaaattagccacctgtgggccaagcgcggtgactcacacctgtaatcccagcactttgggaggtccagccgggcggatcacctgaggtcgggagtttgagaccagcctgaccaacatggagaaaccctatctctactaaaaatacaaaattagccgggcgtgatggtgcatgcctgtaatccaaactactcaggaggctgaggcaggagagtcatttgaacccgggaggcagaggcagcagtgagctgagatcatcctattgtactccagcctgggcaacaagagcaaaactccatctcaaaaaaaaaaaaaaaaaaaattagtcagctgtggtggcacatgcctgtattcctagctacttgggaggctggggtgagaacattgcttgaccccgggagactgaggctgcagtgaactatgattgcagcagcactgaactccagcatgggaggctggctgagtgagaccctgtttctaaaaaataaataataaattcagcgggtagaattactcttattttcctcttggttgctttactatgtctcatgacattagcaattttatacaaggataaaaggaggccaaataatatggttattcaaacagttattcagtgttttctcattcaatgtctcatagcacagacagtagcaaaactcattcaggaacaaaggactttgagaaattttgagaagctggaaaactggtttttcgttttgttttgttttgtttgttttttgagactgagtctcgctctgttgccaggctggagtgcagtggcacaatctcagctcactgcaacctctgcctcccgggttcaagggattctctggcctcagcctcccgagtagctgggactacaggcgcccaccaccatgcccagctaatttttgtatttttagtagagacggggtttcaccatgttggtcaggatggtcttgaaccccctacctcaggtgatccgcctgcccggccactgttttttttttttgttttttttttcttttaaaaatgatagggtctcattctattgcccaggctggagtgcagtggtgcggtgttgtggtcataactcacttctgcgctcaagggatccccctacctcagcctctcaagagtaactgagtaagcattcctcccgcatcagccttccaaagtgctgagattacagatgtgagccactgcgcccagcctggaaaaccattctaatccttaccctccatgaggtcaatggggcttgagatttaggagtttgtcagagaggcctgctccacttcatcctgactggtctgtgaagcttctcttcactctccctgacacttccctctcgaggtccaggcttgggacctgctcttactgttgtcctcatcacagtgtggcaaattcccttgtttgtccccaaccattccatgaatgggcaccttgtctgaaccatctccctggcccagcacccgggatttatcctgggaggtgttcagagaacgccttacatggaacagatgctcaagcatatgttcccttatactctttatgccgttcagccccatgaggaagtgtgcatgttgagcactgtacccagatgcccctggagcccttccagggagtggggtcctaggaatggctttcctgggggctttgccgatgtccatccatctccaaaagacacctgcatgccattttcacgatagagaaactaaggttcagggaggaagtgcttggcccgagtcttatagtgagcagaactacagccctgttctccagaccccacaccctggctctatgcacaaacccgctaggaatagggtagattttgtgtctttgtgaggcctttttgagtttcaatggaatcaaacctaagttctgccagttaccagtaatgtgattctgagcctccttatctattatagggatgagaataatacctgcctcacaagatccttcagaagattcagtaaaatctagctgggcacggtggctcacacttgtaatcttagtactttgggaggccaaggtgggtggatcacttgaagttaggagttggagaccagcctgttcaacgtggcaaaaccctgcctctactaaaaatacaaaaaaaggtcgctgggtgtgctggcaggcacctgtaatcccagctactcaagaggctgaggcaggagaatcacttgaacctgggaggcggaggctgcattgagctgagattgcgtcgctgtactccagccagggcgacagagtgaaactccatctcaaaacaacagcaaacaaacaaacaagattcagtgaaatcgtgtaagaaagcccctgaatgatgcaaggattccttctgtgtttctacttatgcaggcagactccactcatctatcggacctcttttttttttttttttccagagactggagtgcagtggtacaatcacagcacgttgcaaccttgaattcctggactcaaggaatcctcctgcctcagtcccccaagtagctgggactgcaggcccataccaccacacccaggaaaaaatttgttttctcgctctgtcgcccaggctgaaatgcagtggcacagtcttggcttaatgcagcctctgcctctgggttcaagagattctcctgcctcagctcccgagtagctgggattacaggcatgcaccactcctggctaattattttttgtatttttagtagaaacggggtttcaccatgttggccaggctggtctcaaatttctgacctccagtgatctgcctaccttggcctcccaaagtactgggattacaggcatgagcctgtacgtgagcacccggctccacgtatttttttttttttttttttgagagggtgtcttgctctgttccacaggctggagtgcagtggtgcaatctcggctcactgcaacctccatcttccgggttcaagcaattctctgtctcagcctcctgagcagctgggattacaggtgtccgccaccacgcctggctaatttttgtatttttagtagagatggggtttcaccatcttgtccaggctggtcttgaactccagacctcgtgatacacccgccttggcctcccaaagtgctgggattacaggcatgagccaccacgcctggcctggctccaggtacaggtaatatatatatatattttaagaccgagtctcgctctgtagccaggctggagtgcagtggcgtgatttgggctcactgcaacctctgtgtcctgggttcaagctattctcctgcctcagcctcccaagtagctgtaactataggcgtgtgccaccacacccagctaatttttgtatttgtatttattatttttttttgagacggagtttcgctcttgtcacccaggctggagtgcagtggcacgatcttggctcaccacaacctcctcctcccatgtccaagtgattctcctgcctcagcctccagagtagctgggattatccgcacgtgccaccacgcccagctaattttgtatttttagtacagtcggggtttctccatgttggtcaggctggtcttgagctctcgacttcaggtgatccacccacctcggcctcccaaagtgctgggattacaggcgtgagccactgttcccggccctaatttttgtgtttttagtagagatggggttttaccatgttgggcaggatgatctctatctcttgacctcatgatctgcccacttcggcctcccaaagtgctgggattacgggcgtcagccaccgcgcccggctccaggtaattttaaaacaaaatttttgtagaagcctggtgtggtggttcatgcctataatcccagctctttgggaggctgaggcgagtggattgcttgaggccaggagttggagaccagcctaggcaacatgacaaaatccatctctacataaaatacaaaaattagcctggtgtggtggcatgtacctgtagttccagctactcagaaggctaaggtgggaggatcgcttgagcctgggaggttgaagctgcagtgagccgtgatcgcaccactgcacttcagcctgggtgacagagtgagaccctgtcttaaaaaaatttttttagggccaggcgcagtggctcaggcctgtaatcccagtactttgggaggccaaggtgggtggatcacgaggtcagcagttcgagactatcctgaccaatgcggtgaaaccccgtctctactaaaaatacaaaaaaattagctgggcatggtggtgggcacctgtaatcccagctacttgggaggctgaggcaggagaatctcttcaaaccagaaggtggaggttgcagtgagccaaggctggaccactgcactctagcctgggcaacgagagcaaaactccatctcagaaaaaaaaatttttttttttaaatagagatagaggccaggcacagtggcatacgcctataatcctagcactttgggaggccgaagcaggcaaatcacttgaggtcaggagttcaagaccagcttggccaacgtggtgaaaccgtgtctctaccaaaaatagaaaaattagctgggcatggtggcaggcgcctgtaatctcagctactcgggaggctgagacaggagaattgctggaacctgggaggcggaggttgcagtgagccgagatcacgccactgcactccaacccaggctgacaacagtgaccaaaaaaaaaaaatagagatgggggttctcactgtgcaacccagcctgatctcaaactcctggcctcaagcaaacctcccacctcagcccttaaaagttctgggattacaggcatgagccaccatgcctagtcatctaatcccttgtttagcctcttccacacactgctcttgggcagctgcaatccagcaacaatcccctctcctttctctgacctcctgcagtttatgagccaagccttctcatgaagctcacttgtcctgaaatcacaggcccatgtttggcttgaaccagagctttcgccttcacagttcaggggttgtacattagggttcttgcttcctgtctaggagtactgagagctagcaggaaataagcacagcttctgactgacttgtcagagtccgggctccaccacactaccgctgagtgattctggcccctgcacctgatcttagagtcttggcttcctcaacagtaaaatggggttcaggccaggttcagtggctcatgcctgtaatcccagcagtttgaaggccgtggtgggcggatcccttgaggtcaggagtttgagaccagcctggacgacatggcgaaaccctgtctctactaaaaatacaaaaattagccacgcgtggtggtaggcgcctgtaatcccagctactcgagaggctgagggaggagaatctcttgaacctaggaggcagaagttgcagtgagccgagatagtgccattacactccaggctgggtgacagagtgagactctgtttcaaaaaaaaaaaaaaaaaaggccgagcgcggtggttcacacctataatcccagcactttgggagcttgaggcgggcagatcacgaggtcaggagttcgagaccagcctgaccaacatggtgaaactccatctctactaaaaatacaaaaattagctgggcttgttggcacaggcctgtaatcccagctactgaggaggctgaggcaggagaattgcttgaaaccggggaggcggaggttgcagtgagccgagatcgtgccactgcactccagcctgggcgacagagcaagattctgtctcaaaaaaaaggggttcaaatgctttcttttccatgctggtgaagatgaaatgagacagtgaaggtggatagttctaacctagagcctggcacatgaacaacaggagctcaacagatgccaagctccttccttcctggctttgcagtgggctttccctgtttactctctccaacggggcatacacctgtgggcgctcgtgctcactcatacccgtgcacgtacacgtgatagtgtcccccttgcacccctgttgagacacatactgagtcagaaatggaaattttcctctcaacacctccctaactctattcatcagcttccagttcctattctctgggtcagtggggactctcaagtccagacttgggccatgacctttccagtctcctggtacagttctttcttttttttttctttcttttttttttttttttgagacggagtctggctttgtcccccaggctggagtgtagtggtgtgatctcggctcactgcaagctccacttcccaggttcacaccattctcctgcctcagcctcccgagtagctggaactacaggtgcccgacaccacgcccggctaatttttgtatttttagtagagatggggtttcaccgtgttagccaggatggtcttgatctcctgacctcgtgatccgcctgcctcggcctcccaaagtgctgggattacaggcgtgagccactgcgcccagccaggtacagttctaaaggtggctgttgagtggagcctgagtgtccctactgcctcaaatccttcccgccatcagccaggcctttacattcctccctccctgccaggacaacctgtttgcttcacagctgctgtggaaaagataggcagcctggattatcaagacagacaaggctccttgctgacagttcccacccacccagaggcaagcgttcctgagcccttaaccccctctgtgctgggccttcaggcctagggactgggcacagcagggaagatgggcaggcctggtaccctctatatcgaattcctaaggctggtggggtcatgagcacaacagggtaggaaacagcatcacctgcacactccaggtgcccattctatatactaagccctttccttcctgggttcatggaagttcatggtaaacagggccttagcaggcctctgaaggctcaggcagaatgctctatactctccactctctcttcctgaggctggttccaggctctggggacagaggcctggctttctccattccaggggtccactggcattagtacaggtgctgaggcatcccctcctcactccctacccccacatcattgccccttcctcctctccagcacccttcagatctctttcagcaaggcccctctcatcttcttgctgaagtcagtgtccctgacactaaggccaacctggaccatctcctagttgggtctcattgcagccactcaggcctccttttcctgaaggtcaacaggaagcagtgaaaagaccagtagtgggccaggcatggtggctcatgcctgtaatcccagcactttgggaggctgaggcaggtggattgcttgagcctcaggagttcgagaccagcctgggcaacatggtgaaaccccatctctactaaaaatacaaaaattagccaggcggtggtatgcaattgtagtctcagctacttgggaggctgaggcagaagaatcgcttgaacctgggaggtggaggttgcagtgagccgagatagtgccactgcactccagcccagcagagcgggactccatctcaaaaaacaaacaaacaaacaaaaattagccaggtatggtggtgcatgtctgtagtcccagctactcaggaggctgaggtaggaggttcacttgagcttagggaagtcaaagctgcagtaagtcgtgatggtgccactgcattccagcctaggcgacagagagagactatctctctatcttgaaaaaaaaaaagtctgctccctcaaatgtttttcccatttcagtaaataacaactccgttcttccgttcttccagatgggacgaagatcttggaggcaatttattttctttttttggacatgttccagattttgatcttcacgctggttagaaaggtatatgcatttatgaaattttattatatgtaaaattcacaagatttgtacccctttcgctatgtaagttatacttccaatttaaaagcaaccactcaattccctattttctatgtattaatcacaattttttttgttttgttttttgagacagggtcttgctctgtcacccagggcaaaatgcagtcacccagggcaaaatgcagtggcatgaacatggtgtgtccagaattggtgggttcttggtctcattgacttcaagaatgaagctgcagaccctcgcagtgagtgttacagttcttaaagatggtgtgtccggagtttgttccttctgatgtttggacgtgttcggagtttcttccttctggtgggttcatggtctggctggcttcaagagtgaagctgcagaccttcgcagtaagtgttacagctcttagggcggcacgtctggagttattggttcctcccgtccggagttgttcattcctcccggtgggttcgtggtcttgctggcctcaggagtgaagctgcagaccttcgcagtgattgttacagctcataaaggcagtgcggacccaaagagtgagcagcagcaagatttattgcagagtgaaagaacaaagcttccacagtgtggaaggggacctagcggcttgcccgcaatttattttcttaattaactttttgctgaagtagaacatatattcaaaaagtgcatgactcataagtgaattatcacaaagtgaacacacccatgtaatcaccatccaggtcaagaaacaggacattctcagggggctcctgtgccctctatttctgtctcttcttccccaaaggtgacctttagctgatctaatgtcatagattagctttgcctgctttttggactttatatggaatgatacaatctatattattattattattattttttgagatggagtctcgctctgttgcccaggctggagtgcaatggtgtgatctcagctcactgcaacctttgcctcccgggttcaagcaattctcctgcctcagtttcccaagtagctgggactacagatgtgcgccaccacgcccaggtaatttttgtatttttagtagagacggggtttcactatatgttggcctggctggtctcgaactcctgacctcaggcagtccacccgcctcagcctcccaaagtgctgggattacaggcgtgagccaccatacccgtctattattatttttgggacagggtctcactgtgtctcccaggctggagtgcaatggtgcaatcttgactcactgcagcctcaactcaacgtcccgggctgaagcaatcctcccaccccagcctcccgagtagctgggactataggtgcaaaccaccatgcccagttaattttttttttttgtatcttttgtggagacagggttttgccacacactcaagcaatctgcaatctgcccacctcatcctctcaaagtgctgggattacaggtgtgaaccaccgcacccagcccatgtctggcttctttcactcaacattacgtttgcaagatttattcaagtatttgcatgtagcagtagttcatttgtttttattactgcatagtattcaatttcatgaatatgatacacatttttcattctaccattgatgaacatttgagttgtttgaatttgggggccattattcataatgctgctgtgagtattcttgtacccatatgtatgtatattgctgttggagtgagatggttgggtcaaagggtatgcttttgttcagctgtagtagattctgtcaaacaggtttccaaagtggttgtattgacatatatttctaccagcagtgtatgaatgttccaattgctcttcctcctcacccatgcttgatattgtaactttttttttcatttcagtcattctggtaggtgtgaagtgataatctcattttggttttaatttgcatttccctgatgactaatgaagttatgcatgctattcctgccattctttactatgtaacaaatcaacctccaacttagaagcttaaacaatgagcagtccatttactatctcacacagtttcaggagtctggattttaggaggttggctgggcagaaatggcttggggtctctcctgcacatgcagccagatggtggctggagcagctgcaggtgtctatctctttctcttcatgtagccagggcccaaccctgtggtccctctgtttgggcttccttacagtacagtgccctcagaacagtcatactgcttacatggtggctaaaggcttaaagagagagtattccagcaaataaagcacaggctttgtcatcgtttgtgatctaaactcagaagtcacataatgtcacttctgcaatactctttattggcctgaatagccacaaaagtcccaccagtttcaagggaaggaagaataggctctacctctaattgtaaggatggtcaaagtgacactgtaagaggaacatgtaggatggaagatattgttgccactatctgtggaaaatacaatctgtcacacagatttcatacatctattggccattcctttgtctatttttctgcggcattaccatttcttcccatactgattggtaaaatatattctgaatgctagttttttttttttttttttgccagacatatatcttgcaaatattttttcccattattctgaggcttgtcttctcattctttttttttttttttttgagacagggtctctgtcgcctaggctggggtacagttatgtgatcatagttcactgcagcctccatctcctaggctcacacgatcctcccacctcagccacccaagtagctgggactataggcacaaaccaccatgctcagttaattttttttttgagatggagttttgctctgttgctgaggctggagtagagtggcgcgatctcagcttactgcaacctccgcctcctgggttcaagcaattctccctgcctcagcctcctgagtagctgggattacaggagcctgccaccacgcctggctaatttttgttgttttagtagcgacagggtttcaccatattggtcaggctggtctcaaactcctgacctcaggtgatccacccgcctcggcctcccaaagtgctgagattgcaggcataagccaccatgcctggctggccaagacctattgtgatgatgcaatatatcaaatttttcttttatggttagtagtttttttttttttggtcttaagaaatcttgcctatgtcaaggtcatagaaacattccctgcttgctctatgaactttatgttttgagtttttacattaggtctgtgatccaccccaaactagatttgggtatatggtgtgaggtagggggttgcaattcaattgtttttttcttttttttttgagacagagtctcactctgtgtgcagtggcatgatctcggctcactgcaacctctgctgcctgggttcaagtgattcttctgcctcagcctcccgagtagctgggattacaggtgcctgacactgcacctggctaatttttgtagttttatttttttgagacggagtcttgctctgtcacctaggctggagtgcagtggtgcggatctcggctcactgcaagctctgcctcctgggttcatgccattctcctgcctcagcctcccaagtagctgggactacaggcgcctgccaccatgcctggctaattttttgtatttttagtagagacagggtttcactgcattagccaggatggtctcgatctcctgacctcgtgatctgcacgcctcggcctcccaaagcgccaggattacaggcgtgagccactgtgcccagcccatttttgtagtttttaatagagacagggtttcaccatcttggccaggctggtcttgaactcctgaccttgtggtccacccaactaggcctcccaaagtgcttggattacaggcatgaaccaccacgctcagctgcaattcaatttttttccccaatacagacccagttgttctagcaccatctgttcctttctgccttgaattgtcttggtgcctagaaataccttttaaggtgtatcaaatgatatcactcctttttcaaagcctttcagtggtttcccacctcagagtaaagaccacaatatgcctcattaaggttctacatgatctggaaagatgagatcctgactcatctcctgataccctgacttactcccttgctccaaacatcctgaccttgctattctttcatcatgccagacactctcctgcctcagggcctttggatggaaaactcttccttcagatatctgaatggctcaatcctttactttcttcagggctaccttcttaatgaggccttttttggataccctaaaatttcagcggactcccacacttcctataatttctttgacttcttttccttatgacttaccattatctaacatactgtacgtttaatttttcttgtttctatctgaatgtaagcttgaatggctgtgcatttattttgttgactcattgctctggcatctaagacaatgcttagtacattgcaagcatttgataaattcattaaatgaataagaatattgaggcccagaaagatgaagttactcacctaagattacacaggtaatgaacaataaagctaaaatctaaacctacattgccttacttcagagtctaagctcttaagcctgagagatgggctccattactgagtagggctcagtataccggtacagaggtgcagtgaacctggcagtttcctccaccttttcttcttttttttttttaagagatggagtcttcctatgttgcccaggctggactcaaactcctgggctcaagcaattctctcacctcagcctcctgagtagctgggactacaggcatgtgcaactgcaccctgctagtcccctccaccttctgcctgtgatggagccaggtgttccagggctggggtttggcctaagcatcttagccaatcagtcatgtccaaggcgcaactgggggcaaggccagtgtgctgttgctccccagtggctagaatgcggaagaacaggctaaaagctgccttgaagctgaagagaggtaggggacctggttggttctcggttcgcagtctctctcctcacagaagacacaatgcaggggtgggcattaagagttctttattttaccagaagggacaggcagtggggcagtgcaacatccaagccccagaccagacatgcagcatccacatgcaggaagagctacacaggctggggcagggccagggtggggagctgggaccactggacattcacagcacccctgccaagacgcttgggtcctgggctcttctgcctccattggagcaaggagacagaggattgggttgcttccccatggctggaaccccatcactctggccaggaagaaagatggcacaagggctctggggtctggccaggctacagcactcgattctgtacagggttggcacagccttgtccaccagaagggcccaacacccaggacagtgcagccctagcaggaagaaggtctacacacttttctgtccccaacagggctagaccctcatctcagaaaacttagcagagttgggaccaaaccgcaccgccccagcaggaacatgcccatgaagaggccttccctgagcacaagcaggggcctcctaaggcagtaggaaactgaggaagctgctgtagacaggaggccttgcctctgtgcccttggggtcagggagaaaggacagggtatgagcgctggctggggccttgggtggatgaggggaaggacagtgtctctgggccctgcaggtcatggctgcccagacctagaggggcagcagcaggtgaggctgtgggcttcctggggcagggtttagggctgggaagaccagtccaggagagaggacagtgaccgtcctacccagaacccctgcccatgctgagctctggccagggccatagggaggatggacagatgcacagagaacttcaaggcaccaggattctgaggagcagcagggccaccccccacagagagtgattgtaataaacatcttcagcttaatctacatgatgtgcatgggggaaagaaaaagacagacaaaggaaaagacacgcagggagatgagacacaaacctgatgaaagtggcagtgaaagtggggtaaaggagaggaagaggaggaggtggacagacaggagagacaggaagacagccagagatggcctgaacacgcagcacttctggtcccttcgagataaggcaccagagtcagtaacgttcccgttgttctgtgggattaaaacgggtgctggagggagggccgggtggctgctgaagagagtgggcctgcaggagcctcacacctgcacaccagtggccttcttgatcaggggtatctgcaaggatgggagatgccatgagaccttggctccagagcccaggaccactttgcctgggccagtccgacgggctacctgggcaaccccaccgcagctaggcaggcacataccttagacaggtccacgcctgtgagggcatgcacagaggcaggcagctcggccagcagtcggttcacttctgatgtgaccttactgttgtctccactgaggaccacaatctcatcgaccttggtaagtggggcagcgattttggcagcaatctaggaggtaagagtgggaggacagcctggttggcgctgactctgttctcagcccggtccagcatctctccctcccttccttaactcactccaaccccaaagcagcctgggtggcccttagtctcgagccatggtaagagacgccctgtgggccagggatggcttaggcctttgtagggttcctgccccctgctgaggatgctcctcatttaacccttctagccatctgtccctgtgttactcgcaaggcccagagaagttctggcacttgcccagcttgtcaagcaaggacacttgaaccctaggacccgcttgggtggaagcctcacctggggcagggcctctagcaccaaggccatcttggctgcatccccgtatttctggtaggcttctgccttgagcttcatccgctcagcctctgccttgcccatcgcctcgatgactgccgcttccgcctccccgattttgcggatcttctcagcctctgcctgtgccaagaggacctgcttcaccctgggggagcccaggccagttaggatcagtgggacgtaccagggtcctctcaagccttgcctgggggccagcaaaccttcaaaccctctgctctgggggctgtcggggtgggagacattggaacggagtggggtggcctgaccttccggctctggccagggaaaggccaccggctcccatctgtaagtgggaggggacaaaccaggatgccgtctatgcccaagcactacaccaggcactggagcctcctttatctatttagtcttcccaacagcagtcccacaggggacatggggttatcctcacttcacagtgagtaagaagacacagtggagggggagaagtggcttccaagctgtggtcaggagagtagagggagtgcactgaaggcagaggagcctgactaagccctgaccccggcacctgggcggctctcacttttcaccctcggcaatctgctggatgcggtgggcctcggcctcggcaggccggcgcactgtagcgatgagctccttgtccgtacgcaggatctcctgtgcctccacggcaatctgtttcttgcgctgcacaacctcaatctcaatctcttcctgccggatcttctgctgttcacgggccccctgcagctcataggccaactgggcctcagctgtctgtggcaagagggtgtgtggcacattagaggctggtcaccaagtcctgatccctgagccccatcccaggatgtcctcaggctgctcaccttgatgttaacctcctcactgaaggctgacttttgcagctcgaaggctcgcttagagtcagcaatcttggtgtctgccatgaacttcacatccagcatctccttcttgcactcagcttcctggggacaaaaggggcagaaggggaaggtgagtgagtagaggtcctgagtcatcatggtcccatcacccctgagcttcccatccttgaacccacatacccggatgcctgcgtcccgttcagcctcggccacgccaatgtcagcatctctctgcaccacggcagtctgcgtcttgcccagggagctcagatagtccactttgtcatacacgtcctggggagggaagggggtatcagaggctcaaaggagcagccagaggcacaaaggtgcccctctaacaaagccaccatctcccagatggacgccaggagatacagcttcccatcacgtcgtaccttgatggtgaagctgaggatctcaatgcccatgcggccaacatcaggggctgccacctcccgcaccagcttggcaaactggtcccggtcctgataaatctgctccactgtcagggtccctgggggcagagggatcaagggctggctccccagggacccagccagctggggaagggaggaggcatgcatgtagaggtaggggtgcatgcggggtgctgcactctgagctgggtcttcctggggtatcttctcaacagcacttaacaccgagcttcctgctgcacagtccaggctgaatgaggaaaagtgtcccaagcagcactaggttcctgagcagaccgacagcccccatcccaccccttcactcataccctctccttaactcaagtcacctgaagttttgaaattaaatatttgaggaaaagtgttttagcttgaaactcctgtgaaacaggccccctgcccagccctgcacacctccctgccttggcttaggggccccgtgaggctcctcaaaggctgaacagggcctcaccgaggatggagcgcagatgtccctccagggtctgcaggacgacgtttttgatgtcctgcacattcttacccagaaactgctcacaagccacggccaggagttccttctccgtcatgatcttcacctgtcagtgacgacaaaggcgcttcagctaggctggagcgaggcagacaaaggccccagacccagaggtaggcaggatggtggctgtgcctcctcccttccttttttcagacctggaggccctggggggctggaatctgtctgaagcctctagtggggagacagcagcacaagggcttctctcactatgaaacttctcctgcactgacagccccaggccctgccacggcctctcctgggcattcggggcttgtctccccacccctccagcctactgtcccctcaccagctaattcctcccttgcaggcttcctacacgtgggagaccctcaggctgaggggcagagagtatgagaagcagaatgagcaatagggacacagacagagaaggaaagagcctggacagggcaggagagggttgggggatgcaaccgagggtgcctctccttcttgagttactcagccaacccctcgccgaggcctacagcatggctgaacctcactgccctgtgaagccaagaggtggatcggggcaggaagccctcacctaggccctcagcaggggatatgatgcagcctccgactcccagagtccagagctcctctgcctcacatggcctctccctctgggccccacccctcccacgcagtacccagggaacaaggaaggcctggattctggggcttgacatttccaacacctgcaaagaatgggggtggggttagtgagccaggagccctcagcactggttctgtccctcgtgggcccgctgaggagagaaggggtgtctgttagtcctgctgggtggccaaaatggcccggtgagcatgttccagtggcgacgacctgactagccctctcttgtgggacttgcgggggctggggtgctggagagagactgcccctggctgctgtcctctcctcctccccccgaacccgagtacgggaccaggcagctcaacggacatgcgcagggctgctgagttactatacctgggcgacacccgtcacagttaaagctaccccctcggccgtctctacgtcctcgcagcggggctgcaacgtcataatctctagggaaatcctgccaagaaacgcaaaacaggggcatgggtctgggggcgcagggcctggtggtgttgggaaagaggccagtacctcactgctccggctgggtcctggtgaggaaggtggagggaggactctccacggggctgagatgggagtgtctgagaaggaggtgggcacgagggcagggtgggtgcaggtggccccaggggaaggagtggaagtgggctgcatatgtgcacacaccctctgctcaagtcagctgaggaaaaggaagtagaaagaagtggttgtgggtggtcgggggctgttggtcaggggagaatccaggtgtagctgtgtgtatgttctaggatagcaagtcagtgctggtcctcccggccctgctgtgcaggccatccgtggatgtcaactgagcctcccacaggggcccttgcccattccttggtctacccagcaccccagggtgccccaggaagttgcttggaaagctctgcctgattgcctggcatcctggagtatgcctactgctgggctaagatggaagtgattctgtacctgccccttgccagagaagccctacctggtggctgcagcctttgacttgaaacccatgtctggtattaggcccaggtgggtcacatggggaatttagactgaagtcacactagagcttcttggccaaggagtgttaaccctggaaagagttgttctggccatgcaatctgactcctccagggtccacagtcacccactttaaaagggatctgggctttgcaggtgtttcaagtgtaggtgtgggtatggaaggagagaggactgcatcaaatagagtattgaaggaggcctggaccctaccccttccacacaaggtgctccaagcctcccaggcctctgcacctcccatggctacaagggctaaggggatggggatggtccccttccccattagagatggcaggatgggtgaagaagggagtggtggtgtagtgtttttgcctaagcagaggctgaagggcaactgaatgcagagggagggggtgagaaagatgtggttcaggcctcttccaggctgggaacccgctggcacacaggctctgagggggcaggggctttttattgttcgctcctgcagtccacatgcctcaaactgagaaggtgctcagtagagagctggtgaatgaagcaatgaagaggggaacccacacatgacagagtaagcatttggagctaattaacacccaagcccaagaatagatttcaccagctatggctgcatggtaacgaaggcctggcatccagggacactcactggcagacttggcagagcttccagaatcccttgctgtttccccacttgcagtccaataggcaagggcaagggacctggggatgtacagggatccatcctggcacccagagcagtggaggagagaaaagaggagagggaggaaggcacggtctcaggaggggagtccatcggctcctgtctgccaggccccgcagggcaggaagagagaaggttagacacggaggaggaagcaggtgggttattacctgtgcaacccctgttacgaatagtggaaccccctccgacgtctcaatattctcacagcgacacaggatggtcataacctccagagacagtctgaggagcagccagggggtggggagaggtagggacaggaagggaaggaggggacacagcaaacacacacagtagttaccagacaagcaccgatgcctgacgcctgggggcgggggggggcatgctgtcagtaatccaaccccccaactgccagctcagccgagggctgcaggacagcagcgacctcctgtgctgatccgaggcctctgggtctcttctctagcccccaaacccttttagtgaggacctgctaggctggggaagatgcctgctgccaccctgggcctgcggcctgaggtcaggaggcttgtgcacagggcacctgggttgcccgccacctcactttcccagggatcctgtcgcaatctgggagactgaggcttagccccccgtcttcacacaggtaaacctgtgtttccagaaatcgggagtgggaggctattctggggactcctgagctttagcaaatgccgaatccgccaggtctgcactatctatcactaaggcaaggtgaggccagaaaagcccaaatgttctgatgtggggccaaggaaggctgggggagagtgtgctcctgccagaatactcagggataaccgggagataagggaggcatttaattgggaatttccaaagttggccaggggcagagagaagattattggcaaagaaaacaaggtgcctcgaagctccctggcccatcctggctgggcctccctaggcagtctgtgtgcagggtgattgtctaggcagaggccaggctgtggacagtgtggaaggtttccctaaatcagaggaaggaagagaggacagaggccgagggtgaaggggcagaagcaggtggagggggtgataaggagcagcagtcgatgtgcagcccccatctcaatcccaggaggggccacccccacagtgccagccctggggcactggccatgcagatgtgcaaaagttgccttcattcgagcccctaacactagcatccttgggcctgagaggattcttgacccagctcagacaggaacccaccaagctctcttctggggaaggagagagggaaataggggagagggagggagggaggaagggtagtggggagggaagaagggaggctgcagctcagatgccaaaggtggaagaattgctcaggtaagagggagagagccgcccatatcagggcctcgggatagtataggatgtggcagcaaaatgcagcaggaggggtcactgagcctggaagaagaatggctgaccccaagggcacgtgacatatagacagctgcagaaaggaccttgagagggaggctgagtatccaggctgagttagaagcctctactctgacccgagaggctcctgccagcctagggaaataaagccccagcctgtggaggcgtcccccaagcaggctagggactagggaagaggctgccccccagaaaaggtgtaagaaggagaaggattactggctcagactacccagcaagtgagaccagagggaggatgtagagcctgggtgtgaggtcggtgtcctgggaagagatacaaggcccttcacctttaacttccaaacttgctgtcagaaaggcttggcccttctgtcctggctctgctccctggagcaggaagggagagcaggggaccaagaatctggagaaaggactgcaggggaattggcctagcagtggctgcccacgcagggcaggtgtctggacaagatactctgttgtgctgggaatgcacagtgtgtggggtggcagtatgtctggagagggctccccacggcttctgacaggccactggcccactcaggtgtggccaggatcctctcgagtggaggctgtggccactactgattactctgacactttgagccttggaccagaagagtccccagcatcgctcacctctggtcgggtaaagtgaggggagaggtgggagagtgcagcggttactgagaaccagtgaagttaatccattgtgccatgcttcccattccccccgaccctagcagatgccctcagactcccaggagcctcaagcactagcagcttggtgcagacgtgagctgctgacgggtgggggatggggcagagggggtttccactggaatctccatgatttcccctgtggggtgaccgaccaccttgcaacatgcccacagctctgctgcccttgttgcctgggtcctggttgggaaggatctgctcctcccctccccaccgccccatctcccataatgaggaagggggcgatcgtggaaaggtagctggcgtgcctcatctcccgggtgggcagtgagggtggcaggagaggccaggtctggccctgccctaggctctgcaggcagcggcaggtagagctggatggtgggccctctggggagctgaaatctcacttcctctagtaagtctttccagactgatttaggaggtccagacctgtcttgctcagccccagcactaattcgttaggtccccctccctgtctaacttaccactgtcacagaaccacttttgactatatgtccattctctgccacatagtccctgcctggattaccccagggcctgcatgggtaagggtgtgcatggggtccctccagcctttcctcccttcatatgcccactccaaactgggcgtataataaagacttcttaaataactttgagttataatcaggaaatcaagattctgcctgggttatgaccctgaattctctgggacagaagtaatgccacctccagtggaaaaaagaacacccactaaggagggggtgcccatgacagaccttcctgatgcatgtctcctgcacccctgtgcaacccatcttacatgcttcttaggaagtcccccccaaccccacccctccaccgccagaatggaatgtggaaatggtagatgctctagctgaccctcagagtgaagcagaacaatgctggaagcccctctctccctggcccactccatgacaggtcctagagcccccaggtgcttacctctgagtgtcggagatacaccaccaggcccaggcccagccgccaaacacgtactgtttatagtcggaaccacaacagccccctggggagcaaagcaaaccaccgcaagtcagtcggttcttgggtctgtctaccctccagcccactgatagcaacttttgtcctttacctgctctgatacttgacaacgcctactgttgggtgcctagtgctgaggttacacatcaatgagagagaagttctccctacccttatgggagttaaagtctagattggtagacaggcaatttacataaagagaaggatagccaatgaatagtttagaatgtaagtgcttccagagaaaagaagaacagaacaggacaatgggcagaggtgatctgaaaaagctttttttttttttcagacagaatgtcactctgttgcccaggctagactacagtggcgcagtctcggctcactgcaacctctgcctcctgggttcaagtggttctcctgcctcagcctcctgagttgctgggatcacaggtgcccgccacagcatacctggctaatttttgtatttttagtacagacagagtttcatcatgttggccaggctggtctcaaactcttggccttaggcaatctgcctgccttggcctcccaaagtgctggcattacaggtgtgagccacctcgccaggccagcttcctttttttttggtttttctggagatggagttttgctctgttgcccaggctggagtgcagtggcgtgatcttggctcactgcaacctctgcctcccaggttcaagcaattctcctgcctcagcctcccgagtagctgggattacaggcatgcatcatcatgcccgtctaatttttgtattcttagtagagacggggtttcaccatgttggccaggctggtctcgaactcttgaccttgtgatccacctgcctcagcctcccaaaatgctgggattacaggcatgagccaccacgcctggtccagcttccatttttaattaattaattcaataaacaagtatgccctggagttcacctgttatcacggggggtgtagacagagagggaacgcagacagggacaacactggggggctgggagggaaggaagagtctcccaaccaaggcgagagggtttgctcttctgcctggcagacacatctcagtgaggctggttctctacttccaaaacattcagaatgactttgttcctctcatgggaacgggtggggaaggcaaggcctcaaaacaaaggctaacttgtggtaccaatgggagaagtggagaaagcaaaaaggcctaaaaaggaagtggttcttggaaacagtgtgtcagctacacagaacatctaattcagccacaacccagatccatgctgtagacatgttctatatgttccctatacagaaacgagaaaaatcaattcctgagatttcttttttttttttttgagacggagtctcgctctgtcgcccaggctggagtgcagtggtgcgatctcagctcactgcaagctccacctcccgggttcacgcgattctcctgcctcagcctcccgaatagctgggactacaggtgcccgccaccacgcccagctaattttttgtatttttagtagagacggggtttcaccgtgttagccaggatggtcacgatctcctaacctcatgatctgcccgcctcagcttcccaaagtgctgggattacaggcgtgagccactgcgcccggcaattcctgagattcttgtagtgaactctcttgttaatgccaaaattcctcatcaagttcaaggaaaccttcataaaactggacaggcagttaacttgcagtgcaaaaaaatgtacaggaaacagtattcaaaggaaatatgtgatctgggaaaaaccagagagtgttatcatttcttctttttttttttttttttgagacagggtctcattctgttgcccaggctggagtacactgtacacgagtacagcactgctggagtacacggctcactgcagcctccacctcttgggctcaatccatcctcccaccttagcttctcgagtagctggaaccgcaggtgtgtgcccccatgcccagctaatttttgtattttttgtggagacaaggtttcaccatgttgcccaggctgttctcgaattcctgggctcaagcgatccacatgcgttggcctctcaaagtgctgggattacaggcatgagccgccgcgcctggccgagcattatcatttccatgttcacaaagttaggttttcatgaaagcttcaaagaacctcaaaaggttgactgactcccaaggtcaagggtctgggggagtttcatgcagctgggttagtgtctctgaggactcacggcagggaataaggcaagtggaggggcagagggcagatcacacagtgtcttgtgtgtcaggccaagaagctgtgtatgtgagtgacagggagcaaggttacccttgagaaacacacaccactttgcatgaggaggaagacactgggatcagggagactggtctcttgcagtaatccaggcaaggcatggtggctgatactggcagacaacttctagagcagtcttatccatgacaactttctgtgagggtaggaatgttctatatcttcttctgtgtttatgctgtgcagtacagcagcctctagcaacatatgactgttgtgcacttcaaatgaggctggtatgactggggaactgaattttttaattaatttaaatggccacctgtggctcctgtccacattggacagtgcagctgtagagtctgggtttgggtgggtgttgaggacaataatagaaacagacacaatggagagaatgggaaactggggacaaattttcggtgggtggaggcaaagaaataaagaaccgctccacctcacccccagtggggagggcttgaaaggttggagagctggcatctaatactgcttaccaggtaggtaacccagttttctgggtctgctgccatgcgtgaagttccagcagcagaaccagaggtccagggatcaaagagcagtgtgggcagggaacagtaagacggggtcctgggtctctgtctgtttctctggggtagaactacctgttaacagggctgctgttcaaggtaagccattccgggcttctctgacctgggaagtggggtggggaggcctctgaggacaagcactcaatctgaaacccaaaccatctcaggatcaagtgaaactggaaggggaccaaaaatcacagcttattctacatcttctggcctggtgggggctggggcatggctgccttgggctagccccatgggacttctcaatgtgcagtgggaaggtggtagtggtgggggtaggatgtgggagtggggtgggggatggacagggtagatggccactcttttttttttttttttttttgagatagagtctcgctctgtcgcccaggctggagtgcactggcgcaagctccgcctcctgggttcacgccattctcctgcctcagcctcccaagcagctgggactacaggcgcctgccaccatgcccagcttttttttgtattttaatagagccgggtttcaccttgtcagccaggatgatctcgatctcctgacctcgtgatctgcccggctcggcttcccaaagtgctgggattacaggtgggagccaccgtgcccggccctagatggccactctttatcttttttttttgagacagactcttgctctgttgcccaggttggagtgcagtgccacaatatcagctcaatgcaacttccgcctcccagattcaagtgattctcctgcctcagcctcccaagtggctgggattacaggcaaccaccaccacgtctggctaatttttaaattgttagtagagatggggtttcgccatgttggccgggctggtctcgaactcctgacctcaggtgatctgcctgccttaggtgcccaaagtgctgggattacaggcatgagccaccgcacccagcccaccctttacctttaacttattctttggcttggggagcaggctgccacagctcaagctgggccttggccaagggcaacattgccaggttcccaagggtagcaacaacaggaagctgaaactgccagattacccgcccctaccagcatcctcccctggaaggcaacttcctgccagcttcctggtcactcagcctgagcacccctcccaagaggccagttaggtgcctcttccttgatttccctaactcttactcgtctcaagacctggaagtttctcctaactgtacctcactctattctttctaacccaacttgctttccctttccacaattgagctgaagaaccacaaaataccccacgataacctctgttccactcccttagcccttccccaggacacagcccaccactctgccctctcaggagcatcccctgcccttcctggccttcctccaccttctttttttttttttttttttgagacagtattgtgctctgtcacccaggctgaatgcagtggtgtaatcacagctcactgcagctttgaactcacgggctcaagcgatcctccagcctcagccttccatacatcgcaatgcctgtctaattaaaaagaattgtttttgtagagacagggtctcgctgagggaagagagagaccctctcatattgttttatactcagtacctgttttaagaaaaaaacaaggaagtgaaatcaaagacaggcagcccagcgccaggcccgaaaccaggcctgggcctgcctggcctaaacctagtagttaaaaatcaactcataacttagaaaccgatgttattcatagattgcagacattttatagaagaacattgtgaaactccctgtcctattctgtttcactctgactaccagtgcatgaaacccctgttacgtatcccctagattgctctatcaatcacgaccctttcatgtgaaatctttagtgttgtgagcccttaaaagggacagaaattgggcactcgaggagctcggattttaaggcagtagcttgccgatgctcccagctgaataaagcccttccttctacaactcagtatctgagaagttttgtctgcagctcgtcctgttacatcactatgttgcacaagccggtctcaaactctgggcctcaagttctcctcccacctcggtctcctaaagtgctgggattacaagtgtgagccagtgtgtccagcccactttcttcctactagtcaagaagtccatatcctggctgggcatgatggctcatgactgtaattccagcactttgggaggctgaggtgggaggattgcttgagcccaggagtttgagaacagtctgggcaacacagggagaccctgtctctacaaaaaattaaaaattagcagccaggcatggtggctaacacctgtaatcccagcactttgggaggccgaggtgggcggatcacttgaggccaggagtttgagaacagcctggccaacatggtgaaaccctgtctctactaaaaatataaaaattagctgggcactgtggcgtgcacctgtaatcccagctacttgggaggctgagacatgagaatggcttgaacctggtaggtggaggctgcagtgagctgaagtcataccactgcactccagcctgggcaacagagcaagacctttttttttttttttttttttttttttaaatactgagtgtggtggcgtccacttatagtctcagctacttgggaggctgaggtgggaggattgcttgagcctgggaggtcgaggctgcagtgagctgtgatcatgctactgcactctagtagcctgggtgacagagcaagactgtatttaaaaaaaaaaaaaaaagtccatatcctactagggggtttagtcttttttgagccacatacccctttagcaatccagcaatgcctaaggacccctcctcaagaatatttgtttattatttatttatttatttattgaaacagggtctcactctgttgcccaggctggagtgcagtggtgtgatcttggctcaatgcatcctctgcctcctgggctcaagcgatcctcccacctcagcctccggagtagctgggaccacaggtatgtgccaccactcctggctaattttttttttttttggtagagacagagttttgccatattgcccaagctggtctcaaactcctggcctcgagtgatccatctgcctcagcctctcaaattgctggaattacaggcattagtctggccaagaatacttataaattcataaaataaatacataagaaattatattgaaagttatcaaaatttaaaaccaagtgtgcaatattagtaatatgtcattctttattaatacattaaatagtaagatctagtggtaaatctaattattagcttaatgccaaaatacagatgaattatttcctttttttttgagatgcttacaagcgtgcatcactatgcccggctaattttttgtatttttaacagaaacgggatttcaccatgttagccagaacggtctccaactcctgacctcagttgatcctcccatctcggcctcccaaagtgctggaattacaggcatgagccaccgtgcccggccaatagattttcaaggtaccagaaataactgtagtgtagtaggaaactttttgctaatactatcatgaattgttgccaacattcataatcacagaaaacactaaatttcagttagggtgagtgaaaataaaattatgcttttctccccccttatccccatcccccgaccccatccaaatgaaaaggattcccctttaaaattttcaaaagtagagagaaaaaaggttttatgttacaaactgaaggagggaagttagataataagaaaggatggaaaagatgaccatgagatgtattagcatcctccttctgaaactgggctgggtgagatgcctctggtcttagacacaggtccaaggagcaaggcagacaggtgggggcaggggtgggggcagttgctctgctctcgcaggagtccacacacaagagggagctggatctcagcttgatcatctcaaatcccaaggtatcattgtgccaggcattatctgtcacccccgccaaccttctctgcttccctgactccagcatcctcagttctcagcaagatctcctcttcccacccctaaaatagcgttgaagctaacagtgcattgacttctgttctgaagaccaggttctcagtaactggaaggcacagagcaacccatctctggggctcttcttgcccctcagtcccaagactttccacaaggatggaactggagcttttgtcttctcagctcagagtctgggcttcctgaaggaaattccacaagaaaaacaaagtgcagtgcagattctggtctctaaaagccttctctaagggtggggactgggagacaggtttaggtcttatggaggagcaagtctgcatttagtgttctctgggagtctcccttctgtcctcaaggctatttctggtcttcaggggggtagggtacttatctcccacacactggggatgtcccagtggagagattgattttgagatccaaagtgagcctgaagccatgttttggaatgaaaattcccagtggatttatcacccctctccaagggttggcagctgtgaggcctggctcagggcttctatccccttctatctcttcagtaaccagttctaccaaatctgcacgcaggctgaaaaaatcagcactgatagtgggaagatagagaagagaaattcctccagctccaggcctccaagctgtcaggcaccaggacccccgtcccccagctcctgagagcaaggagctgcacaacccggtggcttgcaaggtgtcagccgcttctcaaagcgccccaaatataaaatctcaatagcagttccttttccccagtaccgcagtccccatgccccacctagatagaaattctggaacttgcagcattttgcaatcccaaactgcactgcccagaaccgggtttcccaacctgtagaggccgcatccgcgtctcctgggcgggcagtgccggtaatccccaacaagccccagcctgcttggaattaacgggtctgactgtgccgagaaacgacctctgtttcagggcccctccccatacaggcacctgccctccagggctgcgcgacccgccccccatcccgggcgctggaatccagccaaacctctgcgttcccggaaccaccagttccctccctcctggaaccccgcggcttcagttcgggacccccaacctcacagtagagcggcggggaggcccgcctagggagggggaggagaagcaaataaacacaggaaaacccacagcgggagggggagcccctggtgggtgcccgagggtgcgcagcaaggaaagcgtgagcacgagatctctcttggaaggggcctcaggtgcggcccgggggccagcgccctgcgccgcgcggtggactcaggcccagctcttccccgtgcactccccagccctgcacccaccccgagcaccctccacagctcccaccttcctcgccgccccctcacctgaaaccaccagcgcctcgttgggccccaccgtgtggcaattgcccatggcgccggcggcacggagggccctcgggaccgcacagacccggacaacagcagcgggtctgcagcgccggccgcgcccagcctatcccgccacccccagcggccggccgcccgctcgctcgcccgcgcccctctgcggtcgcagccccgccggaagtgtggcggcggagggcggggccggcgcgttgaggcaggagtgagcgcagcttcggcggtcaacgcgctttattccgaggggcttcagatacagatgaccccagccctgcatccgcccggaaggcgtccccttactcccatggggcacctcgataccagctgccctgccctgactcacttctcagcacccatcttacggcagtcggccctggcctcagacccttgggttcagatcccaggccctcctcctactcactgtgagaccctaggcgagtcccttagctcgggagcctaattccgcttcattaacatgggggtaatttaactacctagctagacggttgcaaagggatcagttcactaattctcaatgttggcagtgcatcacattgcaaactccctgcctctgctccagagctgatcagaatcaataagggtggggcctgaaaatactacatccaaatttccgagaagcacagtgtctagcatacccctatctctccatctggggttactgtcactctcaggaagaaataatcacccattattccttcaaccaggaaaagagatgtccagggcacagcttggggccccagaaagtaaccacggaggtcaagatcacaaacccgtcagtgtccagggcatggcctcgcacacatccgaggttttcaaggaccatgaagtgccatggcaagcatcctggcctgagggttaggagagctggatctcaggctcaactttagcctgaattcggtgcgtcatcttagacaaatctggtgagctctgagggctggggtaaggttgagaaactgtgggctcctcagggtggggggtgcttagagaagatggggcctctgagtcctcagactgggggtcttcatcgggttcagcatcctccccaggcccaagccctgccagcctcttgctggcctcccatagccgatgggctgcccggtcgtctcgggcagctggaggcacctcttccacatggcagttggcaaaatatctcccactgaggggctcgatgccctcttgtagagcacaatacaggggtgtctgggcaccccctcttggtgcccggagcaccagccaagccaatgggcgcaaaagtgggcgcagccatccaggaacatggcgcaggaacagctccgagttcacaggccctgtaggcaggaagaaagaaaggagtcgggctaggcacagtggtgtgtatttacagtcacagctactcgggaggcggagcaggaggatcacttgagcccaggagtttgagaccagactgggcaacatagtcaagctctgtctctttaaaaaaaaaaacaacaacaaaaaaaatagaacagagctagaagaacagggacagaatctggtttcaagggaaccaggatagtatttaccaggcattcggggcttctgcgaggtgacttcactcatttcctgcatgaagcctcttcgcttccatccagactgcttgttcaccccacatcccagattttgttcatgctgtgtcccatgtctgaaacaattctcagtctctctccatcttttcttctagctcaagtcctgttccttgtttaaccagcatttattaagtacttgcagtataccagccactattttggacattagtgatatggagtgtaataaagacttaataaaggctaattgtgatcatcgctattataattactaatgagccttaggcagtgactatctaaaatgcagtatggtaatatgaatatgacagatcttgttatcctggtataacctcttccataagacaaagtgttgctctggatccccaattatctcactcagagtaaaagccagaatgcctatagtgaacctccctccaaaccctacaggacacagtgcctctctatgacctcacctcttgccactctcccccctcactctgttccagccacattagcctttctcaagcacaccaggaacttctgccttagggcctctgcacttacttttttctgttttggagacagagtctcgctctgtcacccaggctggagtacagtggcgagatctcagcttactggcaacgtccacctctaggttcaggcgattctcctgcctcagcctcctgaatagctgggactacaggtgatagccacaatgcctagctaatttttgtatttgtagtagagacaggttttcttttttttttcttttttctttttttttgagatggagtcttgctctgtcccccaggctggagtgcggtggcgtgatcacggctcactgcaacctccacctcccggattaaagcgattctcctgcctcagcctcctgagtagctgggattacaggcgcgcgccaccacacctggctaatttttgtatttttagtacagatggggtttcaccatgttggtcaggctggtctcgaactcctgaccttgtgattgcccgcctcggcctcccaaaatgctgggattacaggtgtgagccaccacgcccagcctagagatggggtttcaccatgttgcccaggttggtctcgaactcctgacctcaagtgatctaccagccttggcctcccaaagtgctgggattacaggcatgagccaccgcttccagcccctctgcacttattatttgcactgttctctctttttctgggcatctccccagtgagccatgtatctttcagacctctgttcaaatgtcacctttatagatatgtcttccttgactgccacaccatattcccgttccatttgccccttgctgtttcctttttcctcagagcactctatcaccacccctcatcgtatatatttattggctgtctccctctcctccaaactagaatgcaaactctatgagggcagggtctttgttttgttcactgctatatccccagcactgcaagtaatgcctgatacagagtaggtactcggtaaatgcttcttggatgaattattagctatcatcatcatcattatcagttcagtcagtgcagatggctcctgggggtgggaatccaggtcttattcatggccatataccccccagggctgaggacccaggcttgtggtgtgagaggaagaacctaaaccaggagaacctggttccaagagcagcaaggaacaggtctctccttggactatgcttccttgctgccctgagattctgtgactcaatgagggatggagggtggggaggcggtagtggtgtggggggcacaggatggggcaaggaaaggagaggggaatcggaagccaaagaaccagacctcacctgggtgggctgcatagcaggtgacgccagtggcctcaagctggttggcgagctcccgggcaaacagtacattagccagcttagtgtcagcatatgcccgcagctcctgccgccagcccaccactgggcggtccaggcgtttgaagtcaagacgtccccgacagtgggcagctgaggctaccaccaccacgcggctaggggcacatgccttcaggcaaggcagcagcagatgtgtcagcagaaagggaccgatatggttcacccgaagcagcaggttaaacgcctcacgggtccggccacaggaactgatacctggggcagaggctaaatgtgagcggctgctccagaaggagctctgcagccttggcatccctatctatgagatgggagaagggggcatccttcccatgtgtccactggccccagcagggcccccgctggagggggcagttgcccctggccacccgccaccccacccccacgcagggcctgctgcccctcaccggcattgtggatgaggatgtccaaccgtggctcagagctcagaaaggcagtggcaaaggcccgcaccgaggccagactggccaagtccaaggccatgaagatgacctcattgttcccactctcctgtggagaggcaagggctgggcttgtcaccaggcatctctctcctcttccctctccccaggcaccaaattctgagagtccatctcctactgtttactaaaatctgcccctgtgtcttagagtgtactagataagtgtgtggattcaaatcctgactttgccttttactaaagtgtgaccttgggcaagatacttaatctctctgggtctcagttctctcactgcgtaaagggaataataataacaacagtcccaatctcactgagcttttgtgaggatgaaaggagttaacgtgtaaaatacactctagcagcactgggtaggtacttgctattattattatcacctcctttccccattaccatttaccctaaaatctgtaacttctcactggtctcctctctcccgctcttgcccccccactccaggcaccacgcagccacaaaggagttccttccaaaggctattctgacagtccggagcctactgagggctgttcatggtctccactggtctctgctgcccaatctataaaatccaagcttctcaataggctctagaatgttctccagccccctcatttgcccatcttcctcatactttgtgctccagcctcattaaatctttttctcagtttttcagatcagtccagctctctttgcctcagagcctttgcttatgctgtgccctctgctgttccctttcctactgatcattaacccaacttctactgatgcttaaacgtctcagaactgcaattacggccttcaggaagcccctcccccactcggctctggtgcgccttcctcgggtgaccccagcgctccgtgcactccctcttcgcgctcagccgcccgcgccgcgctctcctccctggacccggatcctccgcagcccctttgctggcttctctgtgtcccggcgggttctcggctcaccgtcccacgcgcccccgctgcctctcacctggcggaggtcgaaggcagccgcctccccgcgctcctggctgcggcaggccagcaccacgcgcgctccccggcgcgccagctccagcgccgtcatctttccgatgccgctgttggcgcctgcggaccgcgggcgggagccgagctgagctgagcccggcgggccgctgctaccgccggcccggcctcctctccgcgcgccccgccagctcgcactcacccgcctccgcactcacccgtgaccacggccgtgcggccccgcaggttgcccatgccgccgcacggcggggccttcaccaggttgtagtagacaagcacgtaagcgcccagcagcaaccccgcgcccagcagcagcgcctccatgccggccgcgcctcccggctcccgcccaggccccgcaccgccctggatcgccgccaggcggctgccgatccgccctgcacaggcctggaacggcgcccgggcgcgtcagcctccgaaggcggaggcgggcaggaggctgggcaggggcgtgtgcgcgtgcgggtgcgcgccggccctgcgagcgccccctaggcgtgcgtcggcgtcctgggggcgtgtgcctctgtggacacctttgaggtgagtgtgtgcgcttgggccctgggagcgccccctaggtgtgtgcctgtgtgaactcctgggtgtgtgtgtccacgtacaccctgtgagtgcacgctaggtatgtgcatgcatctgcaacgcttgtatgtgaatgatctctaggtgtgtatgtgcccatgtccctgaggatcaccctttgggttgtgtgcgtgcctctggatcctgtgtgtgagctcctgtaagcaccttgtaggtgtttgtgtgcattctggcagagtccctccaggtatgtgcctgcatctgtagtctctgccagtgcatgtgcttgcatatctccatatgtttactcgaggtgtatgtagcacagtccctcccttctgaagttaggtgtgtacatgaatacacgtgtgtctttgagtctagtcctagatgcttttccctctaagaacaaatccttctccttccttcccttctgcacaaatccttctcctttccttcctttcctttccttccttccttccttccttccttccttcccttccttccttcctcccttccttccttccttccttccctccctcccttccttccttctttcctttctttctttcttttgagacggagtttcactctcgttgcccaggctggagtgcagtggcgtgatcccggctcactgcaacctccgcttcccgggttcaagcaattctcctgcctcagaatccagagtagctgggatcacaggtgtgtgacaccacacccggctaatttttgtattttagtagagaagggttttcactatgttggccaggttggtctcaaacttctgaccttaagtgacccacctgcctcagcctctcaaagtgctgggattacaggtgtgagcctctgcactgggccaaatccttcgttttcttatcttcacatccagcccccagcttctaggattcttccgtgttctccccacacaggctagagaggacactgttaaaggtggcacaggcagttaaggggtgtcagaattcactccttcattccccctctgtatctccctacctcaaccccactagtgccttccatggctgaagggaagcaggaagagatagagagtaaaatctgttattgcctttcaggaggaaatttgcctttggaatggttctcataggtgataagagacaggcagagaagctccatcactcaattacaagtgaccatgatggcaggaagggtggggctggctaggaacaaatgggtaagaccattccagggcagaaggccgttgcctgatacattcagtacaatttagaacctggtatttggcacttatggtgtgcccagcagtgtagttagacttggaaattccgagtggaagatatacaagtttctgtccttagggagttcaaaaagcccattagggcaccgggagcagagtgatgacgcctgcatgggcagatgaaagtcagggacagacctcagattccagggccagtttcctatttagctgcactgcggattcgggtttccattgtagatgctgtgggatgaggctgggggtagaatattcattttctatccctaaggcaaaatcctgacacacaagcagatgcacctacacaaacagtgctggaatatacacagaggtgctctccatctgaggaggctgacctcaggaaaacttcctggagagtttttcactaagatctgggaggaaagcatggaatttggtttaatgaaggtccccgggacttgagaattaaggtaatgcagcagactcgttttttgatgaggaatagcagttgtagagaagtgtgactgcagatcacatgactagaagtgacaggtcaagactagattccactatcagtcagggttctctggagaaacagctccccccgggccagcagacgcacccatgtcattccattgtcatccacccaccctggctcacttttctccaacacctcccctaccaaacttccctatgggaatgagacctgttcaaaaggccccccacctgctagacccagatctaggggagggtctcctctaagggtgatgacaggtaggacagacagtcagaaaacaatttgaagtatttttgttttttatatacagaatacaggaaagtttctgtaaagtctaaaacattacaattactatgtacattggtactggttgtgggggtgggaggagaggagggaaccaggggcaggaggaagaggagagaagtggcaagagaacaaaaaaaggagacaaaacaggtttacgacaaaaacatttttgctacaatagacaatttgagaaaacgctctaccacatgtagtactgtacacggtttttaaaaacattgaaaaaatgtcatcactagatgtatttacacaaaatccaaatacacttttccttatttgaaataaaatagatggacagccagaaaaagaattcatttctcatttgtccataatacacagtagctacctgtagtgcaaccgctgcagaaagggaaaataacgtggagggtgggaaccatggaaggaaggtgggtagcgatctttatattaaataaaacaatgatattgtatagattttgctgtatgaaaactgtattttttcttttaatataaaactattgtcactgccacaaaatagaacaagtttctgattattttacaatggtgggcgagggggagggagcaggaggtgggtggggaagggttttgtgttggaggaagtgtccagaccctgggtctttccctccctgcccacgctgttcctcagctcaggtctgccgctttcccatgaaatgttgagtacaaatatatgtgcaaatgccccctagaacttgagaaaagaaaaaggatttttaaaaaacagtcaaaaggttttcttcatttcatgcaaagattgtagttgaagggtttctggtagagtatagaaaacacccgggcttggtttgtgtacatttttgcattgcaggagtcttgggtgggtgtacaggccagtggcggggtagccgccagtcctaaggaacagagttggagcgcagcacagggccctggtggggcttgagagagagcttctcggccaagaccccatcctgcagcaggctggcatcgcctttgggctgtttggtcgcaaactcagtgatgctgaagacaaactgcaggcagcccagcttgatgtagctgccatggtgcagtaaggctgtgccctcccagccggccccactgcccccaatcaagctcgagctgctggctttgcaattgcagggtctccgctgcggcccctgggcctgggaactcatcatggctgcctcctcacttggctcttcgtcctgtttctggtgccggcggcgccctgggaaaaagggggatggtcacagaagaggaacagtgagcagccaacccatgtgggctgtttgccaaggttgggctcctgcatctccccattccaactgctgcatgactagggaggaaggatgctcagaaagggttggtggagtctgaagtccccacaggtgtgtacacacatgggggtactcagcacttgcttctctgtggcctgccctgggcccacgaggaagtagagcttggccaataggactgggaaggcaagagacagaccatgggcagcaagtcagaaccaccctgactggggcctcagctttgtggccacagatctctgctccaacttactgatgacactctgcactttggcaacaatactgcttgggggggttggcggggtcttctccgagaagtcacatgaatacagcacattgtccaccgttgtcccatgctcactgtagtttaacagctcataatgtttggtattctgaggaggaggaggggagataagatgtgtggtctgctgtgtggggcctggggctaaggggagagaggacatatggagaaggccgtgctactctacctagagagtccttacttgcctccccagtcatggcccctgtcctttcagaagggggctggagacacctcctcagggaagctttccttctggtgtcccacactccctactctcccactccttcactctgccctctcagcaccgctcctcttggtatgatactcactggcccgtgatgataatgaaattcacagggacacacccacaaggcttggcttccttctatgctggtcccctcccttgctttagggtaggctccctctgttgtgcctgtgactaacctcaggaaaaatggtagccctgctcctgggaagcaggtagcttcccaggtaggatgctatttcacatcaagactctcctcctccaggaatgacagggagggaagaaaaagagaggacccccaatccctcttccctcccctcagggcactgaacaaaaacctactgcctgggagaggcctcaggttgggaaagctccctcccaccgcatctccggccctcacctcatcgtagaatatgcaggcatgtttcccggacacgtagttacagtgaccatagtttgtaaggcacacatccatgtcagctcctgcaaggtggcaggagtagaggaaaaggaaggcagagaacagattgtaaggtgcatgtgtcggggaggtaagacagggagagagttagcttctgggttggcactagcagagacttcaagggtgagtagctcagggccctccccttttatttttgaacaaaaactgttgtcttttccaagctcctgataaagaacagctgtccctgccagctgatctgctttagaacatgtggctgctacccagaagggaagagtgagctactgaagaggatgggatatttctatgaaaatacaacatcggggtgcagagcctagaaaatcttatcaccttaaagaaagggaagtttctagggtaagggctaatctgtctgtccttctgtaccagatacagagctatcggtctctaggacttttagggaaaacaaaacaaaacaaaaaacagatacagggctaactgaagattgggtatgtgtgagtctatcactctttcaaagaccaccagggacaaagcatctgccttctccttaggttcttccctgcagtgtttaaagtgcctccctgggcagtagtcagagctgactttcatctctgctgttgcaacactgggcaaagacaaagcaaaagggcctgaacaagggaagacaaggaactgattgtctcttttatttttgagacagggtctcactctgttgcctgggctggagtgcagaggcacaaaaaggatcactgcctggacctcccagcctcaggtgatcttcccacctcagcctcccaagtagctgggactataggcatgttagcccagctaattttttatatttgtttttggtagagatagggtttcaccatgttgcccaggctggtctcgaagtcctgggctcaagtgttcctcctgccttgtcctcccaaagtgttgggattataggcgtgagccaccgtgactggctgattgtctctattcttagtttctcttgtctagctatccactgatttaaagcagtcaactctggaaagggcttccctcacccctttctaacttctgtgggtaagggtgtcagtctttagggctgaacagattcagtgtctctcccagcttcctggctggctcacctgtcccgatgtagagggttcgatagcacatgttcacagctcctcccaaccctaagagggggtagaacacagctcgggcctgtacctcctttctttgcactacaagacaaacataggaataggatcattcagaaactcagatcctgtgatccaaacataaaccaacaaaatctggacctttggctcatggcctggagaaaatcccgctggatgactcatctttccaaactcacatccaacactgagctgcggcagggtaaggctttctctccccacccacagcatttccaacacagggtacagaggaccatctttgaagatggtcagagaagtcagagatgacagtactgtgtaagttcctgggctcctggctggctaatccgggatattccagctggtactatagggagaatatggaaaaacagacggcatggaccagtgtttctcaaactttaatgtgcataagaatcgcctacagatcttgttgaaatgcagattctgattcaataggtctgaggaggggccttagctctgcatttcttttgctgttttctttaaaaataggcaaaaaaccaatgcattgagctctgcatttctaacaagctctcaggggctgctgatgctgctggtctgcgaaccacactttgaagcagcaaggctcttaatggccaatgctcagacatatctgaaacagagttaaccacttggggaaaatttccagaaggttggcctagtgttattctatttctcaacttgaacttgaaaagttccctcttgggaagccattctttttaaaattttatttatttatttacttatttatttggagacagggtctcactctgtcacccaggctggagtgcagtggcacaatcatagctcactgcagccttgacctcccagactcaagcgatcctcccatcttagccttccaagcagctgggattacaggtgtatgccaccatgcctgggtaagtttaaaattatttgtagagatagggtctcactgtgttgcccaggctggtctccaactcctgggctcaagtgatcctcccgcctcagcctcccaaagtgctgggattacaggtgtgagccactgcactcagtcgggaagcccttctaattcaaatatttgaaagcaagtaagcagaaagtacactacatatacccaaaggtactggtagctgctttgctgtgtctcgaagtggacttatatatgaaagaaagttacagcagacttccccaagtctgatcagaaagctgtggttgccatcttgttcctgctctcttcagaaaaaaaccatggtgctttattaagcccatgaaaagcacacaaggaggtttgagatactggaagctcagattctccatggaggcaaggtgaccattcgcacacgtagaggggagatctgatgatgtggtgacaggtgtgtacatgcgcaccttctatgtggtgccctccagaagccagctgatgtgtcccgacactgcccggtgaaggttggacccgggaggggaaaagctgatgtattctctgcaaggccagaaacttgatcagcttctcgtccagcatatttatctcgatttctattagccaaagagaaagattaaaaagcagctgagatgggaagtggaatgtggaagcaaatcagggtcacagagcaaatagtttggcatttctaaaatccagccaagtgatttttactcaaacagcattgagtgcagagcgtacaaggatctgcagctgggcatctcacttgccatttgcagtgagatgggccccaatgcagcctgtgcagctgcctcctgtagttgggtggactgattttaattaaagtgcccctagaaaggcagagtggaataaaccacttgcctgtctgtgggggagggcctggatgtctgatattgagacttgaactttctacccaccttgtgttcacagagatcaagatctgtccctgttctcctggactttgggggtttcccacagatgaggtccctcctttgggagtgaggatcttagttttattctgcaaatccaggtgatctgcctaaagtgattttgttctcgtctcactggttcagcttggctctgtcctcccttcatctttgattatgtgtatatgcacatgtagaaggcagagctacagaaggagctttctttttcaccccgcccccccatccaaaaggatactcctcattcccatctccccctaggcctctgggatcaggtgtcccttccctccctttctgaaatgagctgaatgctgtataggaatagcaccttcaacatagcaaacggtggaacagcagcagctcattcactcacctccattgacatccataaatgctcgaagtgagttggtgaggtccaccatggcagtagagttggctgggaaagagggtacggttaaagcgcttcctatggataacgtgccggggctgaccttgccatctggggacggagcaggaagactgttacttacgtcgcctgagggaaacccaccgtccaatcccccactgctgagacaggtctggatttcggacccaaggtgatgttcccttcttgattctcaacccataggctctggaactcctagagctaaaaacgtgtggtgaggaagggcagatggaacgacaaagcacccaggcacgcaggagtctccagagcactgagaaccactgaaatccactgctctggggaaagtggtggggcagcttcattctttgggccatgaccacctccctgctgcctctactttaaaataagtagtgcctgcccttataattcttgcctactgaaatatgactcacggcgtggagaatctacccacgctggttttaagcgataaacagagataggaaaacagcctgggagcggggccatcctgggaccaggggctcccatgcagagaaatcacaatcatctggttaccgagactcccagctgactaggaggccggcttcagttcagacgggagagaccacagagggttccggcagcatctgaaacctggttcagatgctggggtcagcaacttcaaggtcctgagtgctctctggggacagctgagagagcaggtccacagtaggccaagtacagacctgaaggaccgccctttggcatgtggcctgagggcacgcttctgggctagaacaatccctgtgggcatcccactctacagctcctctgaaagacagtgctgctgtctagccctgcttcctgacatggaagttcatcagattaactctttctgagaatatgcatcaggcatgaatccattcttttgtgtggatctgacaatactgaggccatcacgcagaacctcaggctgatcatagtaattccagagagcaccctgccttcttttaaggtgacagaacaaaacaggcagaggcctaggcctggaaggtatgggatggagtcaggagacctgggctgtggttccaatcctgccactgactcagtaggtcattttaaggaaatcactgaagctttcagagcctaagcagtcccatttataaacgggacaagttaacatgtgcttcctcttctattacggaaatgagagtaagacaaacaatacaaaggccaaagtcctctgaagtattcacagggatataagtgcttttagaatcttatttgccagaaagagcataaaattattccaaatcaacccaaggctgagcagcactcacctgacgatggcgctggtgagctgaatcgttggttggctgttgtggccaagataccatctcctgctgcttgcgggggagtgagcacccgggtggcgtttgggggtgagcccagtggccttgaatctgtcaacggaggtcctatctgtgattggacagtctttctttgcaaagtgctggtgttctcgatgctggcacaagagctgggaatggaagggggcaggcttgggacaggaaccaaactcctctgggggcaagagctggggccagtggcattctctgtcttcacaatgatgccgacggtgtggttctgaaggcccccagccgctggtggcgtgaggggccggggccagccttgccggtgtgagaggcctggtagtggggtgttagcgcctggaagtcgccgggggtccgtggaatcagtagggctgctgtagaggtgtgggccattagctttcacctctgtgttcactggcccattggcagtcccacaaggggttttcttggatttttccgcacaagaactgcagccgatgtcctctagggctggggactggtggggtggagagcagctcagggaattctgggtgctaatccctgaggggcaggacaaggggtagtgggaaggtgtaggtgtcttgtcagctgtttgcagggaggtggtgactgagctgtcagtcacaataacaggcttaatatcagccttctctgtctgttcagagtcccaatgcgaaggcatctgcttagcagataaatgtttcaatatgctgcactggagcgcaacaacactacagagccactgcaatggaaggagaggagaggggggtgagaagcctgagaggcgccggtccttcctgccacagtggccagggctgcagcagagctgacaagcagtttccgaggtcccatcatgaatgctcacaaagggtgtgcttgactcctgatagaattccatttccattcccaagcaagacttataggtaccctcagcaggccaacactccctctggccaacagagcttgggatctgcattttgactctgcctttaaggcttacttgtgaccaatattcagcaattaccccgagcacctgtggtatgtccagcactatcacctaacctctctatgggtctactcatctctttctacagtatagatttgcccatctcacagtgcactggggtaacgatggagagaagcagaccagttgcctttgtagatctcttacttgcctttgggatttgagccagaagttccccctggaatactcaactcttgaggggttaggatgagggtgggtggggactggaatgagaatgacactgaggctacttctgataacagctgtggtgacacagaaggaaggttggatttggaatccccgccccaccttcactcacctcttgctgctctgcttgggtggctaagtgctcagagttcaaaaggtgcatctgtgattcctcagggatcccattgcagatcagctccccgtcccgaatggccgcgggtgcaatgagagggggtggaaactggtactgagattttatagcatcaggaacctgttcaggatagatagaaggaggaaggagagggagatagttccaacatgtctagttgattctgccctggtatgctgttctgtctgtggtgctggtgctcaagggaccatccactctggggtctgctgaggaaaaggaggctcagaaatggaaatagcaggtggggcctccactttccttcatcaaggtctaaggcctgcagaacacagaaaccactgcgttctgtcttctgctttagcctgaaaggtgtaagactggcactggacagggcttcagagtggtactctgggttcttattgctcagtgtcaagtttgggagtgggtgagcagtcactgagagataaaaatgcttaggccaggcgcggtggctcacgcctgtaatcccagcactttgggaggccgaggcgggaggatcatgaggtcaggagatcgagaccatcctggctaacatggtgaaaccccatctctactacaaatatgaaaaattagccgggcgtggtggtgggcgcctatagtcccagctacttgggaggctgaggcaggagaatggcatgaacccgggaggcggagcttgcagtgaaccgagatagggccactgcagtccggcctgggtgaaagagcgagactccgtctcaaaaaaaaaaaaaaaaaaaaaaaaaaaaaaatgcttgacatgaggcctggctcatgataagcactccatcaatgtcagtttccttcatccattcattcatgactcatgaaacaactaaagacgtctttgtgcaacaaaaacagaagccacactctgaatcacaccatgtaagaatgaaagagccacacaagcaaagagtcattcatacattcaaccaacatttattgagcacctcctgtgtctgggcactgttccaagttctagagatccagagatgaataaaagttaagacttgccctcaaggagctcacagtctagtggggagataaacacagaaatattacaacacaaggtaatgggttctagaagagaagcatgtctaaggtgctattaaaaacatagtgcttattttagtttgggggacaggaatttgggattggggatgattttataggaagtcagtatttgggttgacacttggaagttgagaaggatcttccaggcagataaaggaaaaataagggagggggagaagcatgtaaggcatagagatgtgatagcactttgtggatttggaaaacatccagagaaccaacagatttggtgacaaaatccttatggtagacaagggagaactgaaaatggttcccagaattttagtttgagggactgagtagtgatcattgttatttactgcaataggagatacaggaggaagagcagatgtggagaggcagaagacttctggtcttatggaggaggttcatcctgagatatctgtgggatgggcaggcagatatgagtctggatataaggagaaaggcatggaatatggagttgagagtcatcaccatgggctggtgatggccttagctggtgccatgggctttctgagatcacccaggaatgagaggaggaggaataaacagtggactagtttattccactacccctggggtaagaacaggatacccctggggaagagtgaagggctaagtggaagagaaattcgcaacgaagatacaaagttctcagcagatttttcctgaattgctagaatcaagtgtaaaggctaatgttccaggagagagctggggttcttcaccaatgttctatggtgctacggtcctcatttcactctcaaactgtccaagtacaaaatgctttgcaggtaactcatgccctttgagtttcctcactagagaaacacttaaaaggtgggaggggcaccatacaacaaggggatttttatcaaggtctcctggcccgttcacttcagcagctatgctctctgacaaatctacacagtgaattacacagtctggattacttttagatctgtttcactgagatgaggcatactacctttaatatcatccatttccgaaatatttgaatctagttttggaaaacctgtgtctccactgatgtataaatatttgcccagttaagtttgttatacaattttcaacagttagcatcttgctagtgctgatacccactgaaggtgatggcagtggtgtgactgacctttttttttgagacagagtttcactcttgttgtccaggccggagtgcaatggcgcgatctcggctcactgcaacctccacctcccaggttctaatgattctcctgcctcagcctcccgagtagctggtattacaggtgcctgccacaatgccaggctaatgttttatatttttagcagagacggggtttcaccacgttggtcaggctggtctcaaactcctgacctcaggtaatccacctgccttggtctcccaaagtgctaggattacaggcgtgagccaccgcgcctggccagtgtgattgattttaaaatgtggctgccaccaagtggccatacttgagaagtgctggtttctgttagcacataagactgtgggatcatttcaaaagagaaaaacaagtttatatatgggtatatagtgttggaccctctaggttaactgaatgaggggattgaatggtttaaaaacatcctcactaccaccaaatgcttttcaaggagggaaatttttctgtcaatctctgtaaacacactttggccaatgtcaagagcatataaatattaggcattattacagctatgccacaatttggagcattggtgatatattaacagcagcctggaaaaatagattcaagtttcctttagatattttccacttaagttcctgagctgggattagctcttcaccttccacatggctctttctgcttaatcatccccacctttactttgcctcttggacagaggccatctaacaggaacagatagaatgagcgttaggtgagggtggcagtaacaacagagcacatttgggtttggtgggatgggctgaagagtgcttatcctttggaaaactagagactggtagacttcgaaggctaacttgaggttcggccctcataatcctgaccatcatccccaagtattaaaatgaaggtcacactcattactcacgagacaccacaaacctatttctggggcttcagtttccctgcctgtaaaattgggacagtgatcctctgtctaacccatgatggcaggcagactaccatcttgcctgcacctgattgtgactcaccttcaagcttcttcttttgaccgactggagcacacgccggttaggggggtgcttcttgtggattcggttcaggaagtccactttgacgacatgctgcgaaacggtgtcctggaaacgatcaaacacctggcaccgattgctcagtgtcatattcttctggttcagctagggacaaagcagacacaaccttgtggtgagcctcaaaaggcacctcctatcccagttaaccccattccctgtgtttaaaaactagaagccctcagccacataggttccctcaattagggaccaggatgtcggcactctttgtcagagagcaagggaacatggatgagacttcctactcagccctgcccagtccagtggaagagagccaatatgttcctgttccctagagagccttaaggaaggcaggagaaattagccaagacgtgcccttccaaattcggcctctgacagtcttctgttccagctcagagaagcctctgtcagggccctctaatagcagcacaggtttcagagaagacgtatgcttcgacccttaagagacccacactcccttcccaggaagggcctctctctaataggaaaagcaggactgtgtcctacataggagcttggctgacaactgggtcagaaccagaaatccgtgtgctctgctctactcctactccgtggtaccaaggagcataagttaacccatcttgatatcagtcttcctctactggaagggaaaaccttggattgctcttagaagccaaaaggagaaaagaaagaagagtttctgcaataatatacgaaggcatacagaaattatgccacttttcctattctacatctgggctcctacattttaattcaaaagaaaggacctgctgtggcagctgcctaattcataaatcaggaaaaacctttaagtggctaacaaaaatttaacccactaagaatttctcaactgctagaaagctgctctttaagtttcacatttgggtaaactgcttatggtcattttttttctggttcatcaggaagcaaaacaagactaggagagaaacaaggaagcaaaacaagactagattttcctcctagaaaaatctttgactggcatgagtcaaaagaacacaaagtaactcttctcttccatgtgtgcaagtctttaaccgaggttcctctcagtgcaaggtcagcagcacactgccatgaaggccaacggtcattccatggttatcatcatttgacagacaatgtcttaagcagtagcctttttaatttggaaggctgctcttatgagggagctcctcctcctcaaatcctctcccattcaatcttgtgagtgactgttctaactgcctataaagagatgtcctaaacttcttttggagatagcaagtgacagctcttttctagcctcagtctggaaaataaacccaagactcttggaagagaaagcaataggaccttcacactattattcattcaacagcttatttactaaacttcatttggtgcctgggacacatgtaccccagacagccaacgatttatttccttaaggttggatctaatatactccccttttagggctataacatcaactgcttaattccctataagtcacttacaaacaaccaagcactagtgagttaagtctgtatgggcagctgaaacaaaacattgtgagaaaaagcatagctgaaatatgtcaaaatgatcagaattgagtagggtggcctgcagaaaccagtacctatgacaatgtggtgaacttggcaccaagctgaccttaatatgctttctgctaatcagtccacgctccagctatgcccattgaggactgaatggacactgctgtgcttaccaccacatgttcgatgtgattcggacacatccatctgcccaggggcatggcagtgagcggcggctcgaggcaatccatgtgaaacaggagagggcaatagtcacactggatgagaggagccacacggcaactcctgcaaaaaagagatgttggccatttctgtggcaagaaaaggaaaattcaaactaactttgacctgtggaacagcctcccctccttgatcctaacattctcccctccttgatcctaacattctcccctatcttcctccagtgattcagttacatttatgattagaaagatggatggggctggtgcgatggctcacgcctataatccctgcactttgggaggccgaggtgggcggattgcctgaggtcaggagactgagactgagactagcctgaccaacatggtgaaaccctgtctctactaaaaatacaaaaaattagctgggcgtggtggtgggcacctgtaatcccagctactcgggaggctgaggcaggagaattgcttgaacctaggaggccggaggttgcagtgagccaagatggcgccactgcactccagcctgggtgacagagagagactctatctcaaacaaaacaaaacagaacacaacaaaacaaaaaaacaacatggatggatttgggggctcccattaggttcttcattattctctcttctaagaagaacatgtcttgcgggaaagtgaatgtttatttggagtacagctaaagtggcagagtagggatgatcaatgctcagtactcactaggggaaaacagtgaactctgctctgatcttcctacttcttaaaagagagagcctacttcattaaaaaaatcactagcaacctttctggagtcttaactatagcaagaaaatatttctcttctgcatgaagcactcagcagaactgacaattagaggtgtgctggaaagatgattttgtaatgtattcatgtaagcagggttcaaaagaggactaagcaaatgacaactacgatttgtaactacaatactcctggggtccccaagatgcactggagccacagtttgtcctggctcagagttctgccactctactatctagttccctttccctataccttttgctgtgaaacatttctttttgatagttactttctcttgctaccctgctctgaccataatacagtccttctaacacacccaagccaacaagtccagcttcagtaactgaagcagctggtttctgtcaaagagatcctatttgaaggaaaccagtgtcccagagactataactggggcagccctaggggcttttggaagtcatccagtccaatacacactatcatagatccttatactacttttaaacttatctttagtgattcaagttaatgtttagtttaagtccaactcctcttgttctagtgtgtaaacacagtttttttgagatggagtcttggtctgtcaccaggctagagtgcagtggcgtgacctcagctcactgcaacctccgcctcctgggttcaagtgattctcctgcctcagcctcctgagtagctgggactacaggtgcgtgccaccacacccagctaatttttgtatttttagtagagatggagtttcaccatgttgaccaggatggtcttgatctcctgacctcatgatctgcccgcctcggcctcccaaagtgttgggattacaggcgtgagccaccacaccgggccattgtttttatttatttttatttatttttttgagacggagtcttgctctgtcgcccaggctggagtgcagtggcgcgatcttggctcactgcaagctccgcctcccaggttcatgccattctcctgcctcagccttcagagtagctgggattacagatgcctgccaccatgcccggctaatttttttttgtttgtttgaatttttagttgagacagggtttcaccatgttagccaggatggtctcaatatcctgaccttgtgatcagcctgcctcggcctcccaaagtgttgggattacaggcatgtgccacagcgcccggccccttgtttttgttttaaaatacagggtctcgctctgttgaccaggctggagtgcagtggcgtgatcacagtttagcctccagggctaatctgcttaagcctctggagtagctgggactacaggtgcgtatcaccatacctggttcattaaaaaaatttttttttgtagagacaaggtttcactgtgttgcccaggttggtctcaagctcccaggttcaaacaatctgaccgcctcggcctcccagattgctgcgattacaggcataagccaccgtgctcggcctcaacacagttcacagtactcctgtactgtgattcttcagaaaatttgttaacacatacacattcaaggctctcgtcagtccattagttagtctccatgtactcatactatcagaatatgggctgttcacatttaacatacatggtctggaagaggtgatgagagaaaaagtatcatctgctaaataatgagaaagagccccttagtatgaaagaaaatacctgttacacgtgaagcagactttgacgggtaagggaacgagaccattgtgatctaattcatgctgtgtcttcttaacatttttccctgtggtttcctcctttcttctcctcttgctagaacctagaaaagaaaatgatggtgctgagctatccctggcttcagagttcctagcctgcaatatggaaacaacattaagtgacaaaaacagatcttaagcatgtgtcatggcctaagcatgaattgctctctgaggcccctggggttgattttaagttagaaaaaagaaagattagggaggaaaaaaaaagagactaatacgtaagtcagaaccagaagtcacctgttctatggcagaaacacatctaactgttttgcaaacataaaatggtcagaaatgctaggttagatacaggcaacctaagaaatgtaaatgtccaagccacatagtcaacaaggactattctgtggagttggcctgcagtcttgaactactgggctcaagcaactttcctgcctcagcctccatatgagccaggactacaggtgtgggccatcaaactcagctaacttttttatttttattttttgagagatggggtctcattatgttgccaagactggtctccaattcctggccttaagcaatcctcctgccttgatctctcaaagtactaggattacaggtgtgagccaccacacctggcccacattttcataaaaatcagagaagctttgattctatatgcatccttcttaagcctaccaatttcactttctttgggaataaaaactaagacctagaagctttacagtatcaagaagccaggacttaaaaaaaaagaatggaggacaatttggcaatatctatcaaaactatatagttttgacccagcaattttattgtcctatagacatagtcacacatctatacatgtatataatgatgtatttacaaagttattctctgaagcactaccagtagtaatgaaagatttggaacctaaatgtccattaatagaaaatgtccattaatagaaaatggcactggttaaataaattatgacgtatctgtacaaagaactactatgcaaccattaaaaaaagcaagaaggccaggcgcagtggctcatgcctataatcccagcactttgggatcctctgaggcgggaggatcgtgtgagcacaatttgagaccagccctggcaacatagtgagaccctgtctttataaaaaatataaaaattagctgagtgtggtggtgtacaactgtggtcccagctacttgggaggctgaggtgggaggattgcttgagctgtggtcacaccactgcaccacagtgcagtgcagcctctgtctcaaaaaaaaaaaaattctatattaatatgaaaagacttctagaacatattttaaagtgagaaaaaaaaagcaacgtgtagaatggtttaactagcatgttacttaagggaaaattaatcagcatatatctgtatttgcttttacatgcacaaagaaatttgagaagaataaacaagaatcaaccagtggttacctgtgaagagcaggaaggtggaaagtaggcaaatggcagacgggtgggagggaaattttcattgtagcccttaatattttttgatttttgaaccatgtgaatgtataatactttttttttttaaaagataattctggggccgggcgtggtgactcgcacctgtaatcccagcacttcgggaggccgaggtgggcagatcacctgaggtcaggagttcaagaccagcctgaacaacatggtaaaatcctgtctctactgaaaatacaaaaattagccaggcatggtagcatgcgcctgtagtcccagctacttggaaggctgaagcacgagaatcgcctgaacctgggaggcggaggttgcaatgagccgagatcgtgccactgcactctagcctgagtgacaaagtgagactcacaaaaaaaaaaaaaaaaaaaaaaggaaaaagataattctgggggaggggaaggaaagaagttcagaaactgagaaaatggaaaactgagtaagctctgtaatggctaagaccttcaaagatctctccaagcagaactaggaacaggaacccaagacagtagctacatgaacagtgactccacaggcagcactgctcttgtgctggtcctttggggaaactggggttgggaagggatatgatgatggtttggctgacctggtagtgcagtggtacaagtcagttcattgggcaactgaaattgggtggggttccgctccatggcggcagcaatcagcagctcaaagggccgcctcagctggggctgcacatagtctggctccgctgctactggttcctcatccacgtcaatgatgtcttcgtcgacatcattctgctcagaggtgggagtctctgtgctggcgctggatgtgggtgtgccaggcctgctggctctcctttccaggatccgggcatgggcaatggcctttagttcagttttgctggccgatctgtccaacaagtcagtgtcactgctgggggatgtagtccgtttgccagatttgtccaccagtccattgacatgacccagctcctttttctgctctcgtttctgtgcaaatgaacaggtgggcccatcatgaaaagtaccatgaaacaaagagatgggtgctacaaagtcctggtagaccactaatcaaaactgtaaaaggccttcacatatcacagactcatctacctggtcacttggaacactggtctgttaaagttgacacaactctaactgaactaaagctgacaaaactgttgcatcagagaatcaccaaaaagcatggtaagttaggaataactatacaaaatatatatcattaacattaactcattgtatgacatacaacatctataaagtatagggtaaagggctaaaaaggtaacacagtgagaataaatttagtgagaccaatagtaaaaatcaatggggcaggcacggtggctcacgtctgtaatcccagcactttgggaggccgaggcaggcagatcacctgaggtcaggagttcaagaccagcctggccaacatggtgaaaccccatctctactaaaaacacaaaaattagctgggtgtggtggcatgtgcctgtaatcccagctactcaggaggctgaggcaggagaatcgcttgaacctgggaggcaaagattgcagtgaactgagattgcgccattgcactccagcttgggcgacagagcaagattccatctcaaaaaaaaaaaaaaaaaaaatcagtgagatcactatagagccttctgacctcctgaatggttttaaaaataaaaactttgctcaaaataagtgacacttcttagaaagtggggaaatggaaaaagattaagtgtactcagtaggactggatatctgatagtacattttcctccaggactccaaatagagtggtcaaatgaaggtttaacactgatctccaggtaggagacctgtgatcttgtcctatttctgccacggatcccctctgaccttgtggtgactcaggctggtgggcaggaatttcttcatctgtaaaatgagacagaaaaatctttctcctcctcctctcagggatatggtggagggagataaaaagggtcatatatacgaaagggataatttggagttggagtaggacctagtcttccactacgaatcatgatagggcctgaatgtcaggagctgatgaaggccagaggatgtattatttcaatccacttcagtgtaaatacaagaggccaaaggggagtagtgctggtgatggtggaaaaggcagacttggcactggtaggcagaggtccatgtgaaaggtaagagaggcatctcaggagaagtgccatgttagaaaagggcatactgtaatccccaacaagtagctctccttctagaaaactgatgaagaggtaacagaggtttggaatgagagaatttggttcaaacattggttctgtcaatacctttgagtccttgggaaagttaatctacatttttgagcctccgtttcttcctttctaaaatggaaacctacggccagcattcggtatccatctatggctggatggatagataatgggataacgtaattaaaacacctggcacacgatgggcactaacataatatttccttttctccaccgtctttaccccttttccttcagctcccctaaaccttttcaggtccagcttttttgagtggcaagtttgagagggctcctggctggcaggtgcctctaacaggccctgctctaacctaattagggatgcacaggaaaggatcttggaaggtggagaggctggaagacagcctggtttatggagaaatttaactacagctgtggttaggtggttgacctggctttggcttgcttttaaatatgaacccttatgcacgtatttgaaaaataatgtctgcttgtttactttctttcttaaaggctgaaactgttacacacataaaccacaatcttaatcatctcatcctgtttctgcaaccaaggaagtcatcattcattgtgacatcatgttcggggaccaggcaaatagaggtgaggtcacaacataggaaagttgcttggtgtataattagtgtggggagcacaggggggtggattacaatgcacagacaaattctaatccatagcctgtaatttgagggttgggtcaatcataatttgggtgcaagcacacctacttccttttttaataagggagaatttagctcttgttacccacaagagttctcaaagtagaaaataataaaccatgttcttgaagccagtactgaattatcaaagctgaaggaagggaagctaaagaaagattaggcaacttggggtacaaatgcgttcaaaatcctctccgtcagtatgccaagtctctggataccagtgacttatttgccctggggtgagagaaaactccattttccatcaagctggagaagcagcctttgtttttcagccatggataaggccacttattaggaggacaacaagaaggtaagactactcctgtcactagtgactaaacatggctcagtaagttaacacacctcttctgcccatttcagcagcccatgtttggatttttaggccctactggattccaaacagtcaccatgggaagagtggggtgattccagggctggaagagacaagaagaagggacaagaatgccttcagggctaggccgtcttagctctagcatatcagtgctctggatcaggctttctggacagtcttcagaaagcagcattattacctttcggcgaacagtgcaccggtgacacatccactctccaggaggcaacatttcttcactcagtggagggttactgtggggaacagacaagggcaagactaaataactagccctttgaggcagtaggaaaagcctagctaggtttgcatgttcctaaactcctattgtggccagtcctgcaggactgctagggttgtctcctccaaaatgcctaagtcagcatcactcataataacctaaggagtgaccatcccttcccacaccttagagagagaagccaaatccagagctattaacactgggtttgtagggaaaggtataataaaataactgagaggtcctccacactgttttcttaaagcctgttagtgtagagccaagcttttctaactgctgttcaaagccctgtcacatggtcccaccgttccatcttcccagaccccttcaggtgctcttcccactattcaaatggaagacttcctatttcttcctctagaatactcttcctttagaaagctatgcctgtcaaaactctattcatcctttcatacctgcctcaatcagctgtgatggattaaagacagctgcaaattatctgctctgcctcccatccacaggtagtccctttccctcctcttgaattgtgcttgtcttatgacttgctttgaccacagaatgcagcagaggtgacaatgttgcaacttccaaagcttggccttaagagatctgcagattctattttttaagaaatatgcttggaaagttccatctcagagccctgctgtcatgctatgagagaggacatggaggagacaaggtattccaatcaacagttttgggctgggcgtggtggctcacacctggaatcccagcactttgggaggccgaggctggtggatcactcgagatcaggagttcaagaccagcctggccaacatggcgaaaccccatctctactaaaaatataaaaattagccaaatatggtggcacatgcctgtaatcccagctatttgggaggctgaggcagaagaattgcttgaatttgggaggtggaggttgcagtgaaccaagatcacaccactgcactctagcctgggcaacagagtgaaactccatcttgagaaaacaaaaaaccagcttcagctgaactccaagccaacacgcagcagcaactactgctatgtgagtgagtcatcttggacttaccagttcagtgaagcctccaaatgactgcagtcccagccaacatcatgtgaaacagaaaaaccacccagcagagcccaggcaaccctcagaactgtgagagataataatgagtttctgtaccaggccaatgagttttggcgtagtttgttatgcaacaatagataaccaaacagcttttccatgagttcatattactcctgtatcttggacctcttgctgcatgggttagttctcttttggcacttctcatgctttgcccatttcagcagttctcttacttattttattagagggactaggacaatgattggatctcttccctccttgtatttttataatacagaggttgtgcacacagcagatcacctgagattggaagttcaagaccagcctggctaacacggtgaaaccccatctctattacaaatacaaaaattagctgggcgtggtggtgggcacctgtaatcccagctacttgggaggctgaggcaggagaatcctttgaactcgggaggcggaagttgcagtgagccaagattatgtcattgcactccagcctgcgtgacaaaactccatctcaaaacaaacaaacaaacaaacaaaccaaaccaaaaaacaggccaggcatggtggcttacacttgtaatcccagcactttgggaggccgaggcaggcagaacacgacgtcaggagtttgagaacagcctggccaacatggtgaaaccctgtctctactaataatacaaaaattagccgggtgtagtggcacgcgcctgtagtcccagctactcaggaggccgaggcaggagaatcgcttgaacctgggaagtggaggttgcagtgagccgagacagtgccactgcactccagcctgggcgacagagtgagactctgtctcaaaaacaaaacaacaacaacaacaacaaaaaccacatttatgcttaagaaattcctaccattgagttcttggctaagtcacctacttggaatggtatgcaggaaatttttcttcaaataatgggggaaatggtaaaaaaaaaaaaaaattgagtatttttttttgagatggagttttgctcttgttgcccaggctggagtgcaatggtgcgatcttggctcactgcaacctccgcctcccatgttcaagcaattctcccgcctcagcctcctgagtagctaggattacaagcatgcgccaccatgcctggcaaattttttagtatttttagtagagatggggtttctccatgttggtcagactggtcttgaactcctgacctcaggtgatccaccaacctcggcctcccaaagtgctgggtgtacaggcgtgagccactgtgcccagccaaacttgagtatctcagagcttaaagctatgctgttttaccatttctacataaaatagcacttgacttggcaaattttcttagctccctgtttccccagagccccaagcttacatgtcagatgcccaccaaggcttcacagctcattacttcccttcctccctgtttccttagtgaaatctcaggaggatgcttaccaggaatcaggaaactggaaaaacaatggcctgctgggacagatctccaagccctagaggaccacaggtgaatgtcacctgtaagtctccgctcattctagccaatgtaattctacaaaaggccacatctaaactactgaaatgcatgcaagtaattttcaaaggcctacagactctgctatgcttcagtagctgtcctatcaaaattaaccctgaagggtgtcacttctgattctgtttctcatcatttctgttcatctgcccactggctttgtaccaagatatcctacatcaaacatttaaaacatttaaagtagagaagataagacccctgtggccagaaccctcttctttctccagctcaatcagttggccggctccctacacagaccatactgtttctcatctgtgtctctgctcactccagggctgctacccacaactacaccactcttccctaactacttcacctggtaagctctttatcttttgagactcaagtcacgtattctttccaggaagctttctctgaaagtctctggttccacagagcacttctgcaccacactgtattcaaaccattacatgtctgaatccccttctccatgcctcatttgcctttgtacctccacaccctgtacaatgcctggcatgtagtaagtactcaataaagctttaaagaactggggaacactaaggaatgggcttctaggaagtgagtgtaatccttcaaagctatgaggggaggtaatgcaatggggcaggcaactgttttgtgggttaaatcacacatgaaattacttatgttttctaagttactacacaatgagacagaagaggagtccaagtccatactggcaagcctgtacttactgaaccatcccacctctactcattttaatcttctttaaacaatttgattttcaatatcgtttatcttaacacaaggtaaaatgcttaaacttgtattaagaggctctcagaagtagcatcttgctagtttctaaaggatcacttttagagttaccaagtttaagaacacacttctggccgggtgcagtagctcatgcctgtaataccagcactttgtgaggccgaggtgggtggattgcttgagcccaggagttcaagaccagcctgggcgacatggtgaaaccccacctctactaaaaatacaaaaaattagccaggtgaggcggcatgagcctatagccccagctacttgtggggctgaggtgagaggatcacttgagcctgggaggtagagccgtgatcgtgccactgcactccagtttgggcaacagagtgagaccctgtctcaaaaataacaacaacaaaaaacaaacaaacaaaaccacacattcctcagaactctagataatgaccacaggctccctttgttaagcctgccctaaagtatggataggggctatgaatttagggagtagtccagggaaacccaagcattgtctcccagatgaagacaaaacatttaaaagactgaggccatcattcctttttttttttttttttgagacggagtcttgctcagttgcccaggctggagtgcagtggcgcgatcttggctcactgcaacctctgcctccagggttcaagcgattcccttgcctcagcctcccgagtagctgggattacaggttgcccgccatcacacccggctaatttttatatttttagtagagatggggtttcaccatgttggccaggctggtcttgacctcctaacctcaagtgatccacccacctcagcctcccaaagtactgggattacaggcgtgagccactgcacctggctgaggccatcacttcttaagatctgctttttttttgtttgttttgagatgtagtctcaccgtatcacccaagctggagttcagtggcgtgatctcggctcactgcaacctctgcctcctgggttcaagtgattctcctgcctcagcctcccgagtagctgggattacaggtgcctgcccccatgtccagctaatttttgttttttttttagagatggggtttcaccatgttggccaggctggtctcgaactcctgacctcaagtaatctgcctacctcggcctcccaaagtactgggattacaggtgtgagccactgtgcctggccaagatttgctgctttcttagggacagaacatgcatcttgaaataacaaatttgaaatgatggtatcttgggagaaggcagtaatatctaagattagatggataggaaagaaaggtcttagaaaatgatcatcataggcatagctggaacacaagaatcacccatcataaagctttctcatgaccatgtttcctctctgcttcaagcaattaattcctttcaagctatttagaaggcagcttttcaattcaaacttctatcttttttttgaggcagggtctcactctgtcacccaggctggagtgcagtggggcaatcttggctcactgaagccttgaccccctaggctcaagcagtcctcccacctcagcctcccgagtagctgggaccacaggcgcataccactacgctgggctaaattttatattttttgtagaaatagggtttcactatgttgccgaaggctgggtcttgaactcctgggctcaaatggtccgcttgcctctgccttccaaagtgctgggattacacgtgtgagccaacacgcctggctcaatgcaaattttttagaggaaagggattcatgaaatggttccaggaaagacactgtcattggggtaagctcaggaaccaattctgaaagaggctgttttgctccatatcagaaatactgctgacagggaaaggattccagggagaaaggagattctgcagcctcacggtactcatgtacttattctgaggactccccacctcagctgcccatctcaaaactccttccgcagctgggtgtggtggctcacgcctgtaatcccagcactttgggaggccaaggtgggtgggtcactttaggtcaggaattcgagaccagcctggccaacatggcaaaaccctgtctctactaaaaacacaaaaattggctgggtgtggtggtgtgcacttgtagtcccagctactggggaagctgaggcaagagaattgcttgaacccaggaggtggaggttgcagtgagccgagaccgcatcactgcactctagcctgggtgacaggagattcttcccaaaaacaaaaacaaaaaccccttcttccttggaagaatggtattcccataagcctagcgtgcaactctgaaaacaattacatgcacaccagagtctttaaatcatgatatgcctgtcaagaaaaaaaggctctgccctcgctccctctcatcctcatgtatcaatgaagacagggtcctggaggccgtcctttataagaaaaaatcattaaaagttaaaagtcacgtaacactgagattactctaccagagtttcagctgcttagcagtgaaaacactataatgagacaatgctgcttttgtaaagacatcaatgtgtttcttaaactaaagcctagaaatagcatagtgataatttcattgacatctaggtattacagttcacaaagtattttaacagatgttcttatttgatcttcactaccatactgtgagataattcttattcccatcatacaggtgaggaaactgacttatctaaagccactaagtagcagaactggaacccaaatcaaagtttcctggctctttgaaatcttgagcctaagctatttttgttgttgttgttttgtttttggttcactctcaggatatgcttcagagcccaagttgttttttaagaacctttagtagtcttcttatttctggggtacacagtgaaatatccatcagggtaccctccttaacctcaaggctgcgcatttccttctacatcagtcaatatttattgagtacccatgactttctcatcaatgtactaggtaccacactgaaaaatgaacgcaaagcaaacaaattatcatctaccccatcaaaaaagtagtctaggccaggctgtagctcatatctgtaatcccagcactttgggaggctaaggtgggaggactacttgaccccaggagttagaggccaggctgggcaacatggtgagaccccatttctacaaaaatacaaaaatgagctagatgtggtggcatgcatctgtagtcccagctacttgggaggctgaggcaggaggatcacttgagtccaggagggcaaaactgaagtgagccatgtccacacgactacaccccaacctgggcttcaaagcaagaccccgcctcaaaaaaaaagtagccttggggagagaggatcaaaatcatccatccactcaaaaattattggatgtttattttaggctagacaatgtgctaagtgctggtatttcagacatggttcttgattttagggatcatgggctggagataaggtgaaaaggacatgcagtaatgagaacatacataatcaactacaaactgattcttaccataaagacccacataaaactcaattacttatggatgccagaatcaatgaagagccccaaagtttggacatttggtacctgaaggtgacatgcgattttttcctactcttttcataattcagagctatttaacaaatggtaattcagccagtgagcctttaaagacagtgaagttaaggatcgtgaggagttcaggaggaagccatagtttcagaagcaggtatatttctgcattttgataaaatacctgataaaaggaaggttctagcagtggagacatttcttctgaaaatgaatgtttaagtctgtctagagcacaatagtgtttgaacctttcttttctttctttttttcttttctattttttttttttttttttgagatggagtcttgctctgttgcccaggctggagcgcaatggtgcgatctctgctcactgcaacctctgcctcccgagttcaagcaattctcctctggagtagctgggattacaggcacccgccaccacgcccagctactttttgtatttttagtagagacagggtttcactatcttggtcaggctggtctcgaactcctgacctaaggtgatctacccgcctatgccttccaaagtgctgagattacaggcgtaagccactgtgtccagcatgtttgaacctttagattccttctgagaattatctgagtacttgggatggtgagctctggaatagttgtcttctgtacctgaactggcttgtcttggaaaactggtagctttttagccaacaagccaaggacctctactttattttctggcttcaaaagagcatagcctgcattgctatgagacatgcattcttttccataggcagagatgacagtgccctatgaagacagagctcttgcagagtatcttcccattttcactgctgttgataaatttcctaccagatcatttgttaaaaggccctggcctacaattcctggccagaaagcgaccgttcactgcttttacaactcactattttattttatttattttatttttttattttgagatggagcctcactctgtcgcccaggctggaatgcagtggtgcgatctcagctcattgtagcctctgtctcccgggttcaagagattgttgtgcctcagcctcctgagtagctgggattacaggcatgcaccaccacactgggctaatttttgtctttttagtagagatggggtttcaccacgttggccaggctggtcttgaactcctgacctcaagtgatccgccctcctcagcctcccaaagtgttgggattacaggtgtgagccaccactcctggccccagctcactattttaaccactacctgatcttaaagacatgctgttagttataaagctgttcataacagtaaagccctaaatcttcagagactgtacattcaattggagggtatgtttctcagtttggtgtggctctctgtgaggcctagagggcctacaaagtgttaagagtaatattaacatacaaaccaattcctaaagccaacctcttcagcatgactccaacatacctagactcccataaacaaatccaaatggcccatctctactgctgagaaggttatctagatcagtctatttctggagtcatcaaggagaaaaccacaaacatacatccctcagctaactgtaatgcctatactgacagatttctgtttcaaagattcaaatcgaagcccagagccagatgatcccaactctcagcccgaggttaaagttcagttttaatttagaatgccttgcattcactaataaggctgcagctcaacactgcaagtagaagatgttggtagttgtcatggttcttggcgctctaattaagaggatctatttcaagtcatataccagtgtggttgatctgagtctaacctcactcatctccctcgcctattaatacatgtgaacctgcacgacattaacatttacttcagatttagtcgctaccagtgggacctgttgctccacagcaccatgttaattatccatccagaacaagcagtttctcagtctggaattggaggggagagcgggggatgggggaataagagaacaaagggaagaggcgagaggtagagggagagaaagcaagtagatgaaaaatatttaagaaaaagtacactccattttctctttctggattaacaaaataattctatttaatacaaatacttaacaggaacactatgtaaatagcatatccatatacaatacaccaacagcctactaagcaggttctcttccaaaagaggtcagtcacatgaactggtagggtctttcttgtcagaacccgtaattcttcaggaatcagaagctctctagccatctatagcagtttcagtttcagtcaaaataaaacatcagttggactaaaaagaaagagttcactgcccctatcatcatctgtatgcctccccacccttttttttggtgggggaagaggtgttcagcaagcaaacaataggactgagcagttttgatttttaatttcacagttcacggggctcatccatccatctgaggaccactaccagataaaaatcctgcaattatatttagtctcactgtgtaagacaaactgcaaaacataaatacatgctcagaactagcctactctccctcagactggccctgcggccctcatccagctcagaaaatgtgttgatactagccaaaatggggagtgaaggtgatcactgaaaggaccacaatcatgtctcagcctcctagcagccattttgctctataaagggagccatgagcacagagaaccagccttttataaacgaaaacaaacttatgtcctggaaaagctaagtggtgctgggtaaagtttaatttaaattttaatttaaattaaaagttgcattaatacacccaaattttaaagtgcatgccttgagggaacaacatttaatgaaatgtaaatgtcagcagaaatagctagcttcctctggacacttgtgtgggcatcagcttttctcttcaagtatggcctgtcttttgcaggaagatagctatattgaaggatattaaagagatggaaggagaaaattcatagggtccctcaaccttaatcccttatcctccttcatcctggctactgactcaaacaccactaatgccacaaagtacataaaaaggtacaaggactgttgggtttctcatgcaaagcctcagtgagagtgttaacaaggaaacaaatgaagtgccagaacattacaaatgccccattgagaaacttagctagttgcgtcacttccacaggcaaacaatccttttaaactggctgactgtgcccccaagttttatcgccttctatgtagagctggctggtggcatcttcccggtaaaggacacctggatacgagtgttactagttagtacagggaaaaaaggaagcagggagggtagagcactgacagttataccaggtgtttgcctctgctaacttttctacaagctgagcctcagtctcaagggcctgatctatcactagcctggtttggctattcttgcaattctggcttctctacaaagaaagatgggctggggtgcaaacattttaaaaagggccttcattaattcacctcatgattgatgctagagcccacctgttttggaaaagggacaaaattctggcctcaacggtaattttctcacactcttgggaacattccattggaaggaagaaccaacaactgccaactctgtattctggaagagtctcagaggtatggaaagctgggtactattctattgccaaattttaacagactatcaagaaaaaggaaatagccaggtgacacacttcttgcagacacagctcaggaatgtgggccagtttacagtttatatatattgtacctaaaattctataaaggctcagaaaacaaaaaatactaacaatgtatttaaaacccaacaaaatcaagagagcaggtttctttctttctttttgagatggagtctcactctgtcatccaggttggagtgcaatggcaccatctcagctcactgcaacctccgcctcccggttcaactgattctcctgcctcagcctcctgagcggctgggattacaggcaggcaccaccacacccggctaatttttgtatttttagtagagacggggtttcaccatgttggtcaggctggtcttgaactcctgaccttgtgatccgtccacctcagcttcccaaagtgctaggattacaggtgtgagccaccgcacccagcctgagagcaggtttctacttaagacccagctgctttttcctaaggagggactttggtttaatttaccctcccctgacagggtctatagaaacaggaaaaagtgagaataatactatttgggccatgccagcacagggattatacccccctacttttacccttaccctctcccatcccccaattccactcataaacatcaaagctccccaccctacaggactgaagtaatctcctgggcatgctgtcaaactgtgctgtcatggtttgatgccacagctaagtgctgacttgggcttccaaagccttccagttatacccaccagtgacctatttatgagttgaacatacttctccagagccatgattttcccctttggtccacttttctttcagatggtccctaaccaaagaatgatcaccctaaaggtctgcatgtgtacacacaaacggtgagcactcaggaaagccctcaaagaaaggcagcaagcatacaaaccttggacatgcgttatttgctataacaaataaaatggagatacttttcttaacatacagcttacttcaacaccaacaaactgtagcctgcagtcagatgcctgatatcacagaattaggcatttcctttggtatgacagtttgctaagttaaaatggctaagtgtcacccatgccaggcaaaacaacaaggaccacaaaggagggatacagcaaaacaaaaatgacaaagcaaaacaatgtttattaaaaagccaaaattactgacaactctctctacattttagatgatgcttttgcaaaaaatggcaaataagatcagggaaagttaaatatagccaacctatgtatcgaactatgacaagttacaggtttaggcacatttaatgagattaatggagcataattttcacaattataatgtattctgaccagtaattgatgactgctaattgaaaaagttcactgtagagtttccctctaaagctgagaatcagcagaactatgatggtttagtgaacgtgggaattaacgagcactcagctgatcacaggagcctaggggtagtggaaagaaaagcaagagtaggtcatcattgccttatttcataatgcagaggcttctttaaattcacttgaagctctgtgcatttcattagtttctctgctctgttctctgcacaaatgcagacaggagaaaaataatattcaacatccctctgaggaccatagctgagtaaaaaagatgcttgtgctgccacaaacaggggtccacctggaactcaagcttgctagtaattctgagaggttcccctatccctgcctggcttggaggtaaagtgatgtctttgggctaccgttaaattcaaaccctgcagagagtcctcttttgctcactcaagcttatttcaaaacgagcctcacgcagagagcccagatcagtaggaaagactgacgctacattcaggcacggagttgctccctgccctgctgttactctgtatgtcttttgtcctgtcaaggctgagaaacatttcttgggagatatcccataaaatttgtcagaaaacaggggagaggcaaaaattaaacaccaaagtcactaacttaaaagaaagcaaatgtaattaggggaaaagaaattttcaccttgtgtctgtgttaacaaaggtatcatccacttggaataacccagatatcatttttgttccccaactactgtttacctttgcatgtctctcatctgtaataccactaggaattacacggcagtgagaagaggaaatgggtcagcctccggcttttaagtagtttagtgagcatttatgtagtacgattgtagcaaaagggaaagtaggcagcagagcaaaagggactcactctctgagtgagcaagtcaagtttttcattactttgaaaattgcatcaatctgcaaggtgcacatgtaatttacttattgtgaattccacaacagctctatgtagtagtcaagttccttcctgctgatgggtcaactcatggattcctccttttattagtgtctattgtatgcctcagcttttgcctcacacaaaatgtgctaaaacctcatctttgttcttatttgctgagacttaggtttaggaataaccttaggcttaaaggataaggattttgatatctggaaatggcaggcagaaaaaggagtcacattctcattcttcttaactgctctcaagtcctgggaaaagcagtcagctagtgacctgtgcatgcgtcctgggcatggtgacaaatctgcaataccaaagtggctttctgaaatttggtctaggacttgcactgaatacaatgtcctcctctttcaggaaactggcaggggtacagccgtgctcctgtcctgtattctcttgggaggcacgcattatgcagaggttctcttctaagtgtcactcattgaatggcaatgcagctggccatgttgtactccctggggcctctaagtcaaaggaggagcccagtggaggggggaaaacagacttttttttttttttttttcctgttctggtgacttaaaacgctggaccttaaaacttgaatgcatttccaggagcttgtgctgcattaatatataagggctaccataaacccaaacggaatcttttatcagggtggcctacttaactgcatacccaaggaattgtccctgtgttggggttgggacaagaaagttgagagatggatttcagtatgcttacccattatcaaaagcccagagtattaatctattttctattactcttcttgtgggagaaaagatgtacccatttctgttcaagaagcaggacagctgcatttttaggtagcaaaaatcctcttgggaggatcaaagcagatggtttctttttatgagccatataaaactgtccagtaaatattctctgcgctctctttatttactgttatctgggcttatataaagatacaaatacacaggtgagtttgctgtaatatacaaacaactttttgttcttgttaactgggctcaaaagacagcacattttaattgacctgaagttatttccaccacaaccaataaaactgagacaattaaaatcttttttttttgagatggagtttcactcttggtgcccaggctagagtgcaatggcgtgatcactgcaacctccacctcccgggttcaagcgattctcctgcctcagcctcccaagtacttgggactcccaagtagcgtgcatcaccacgcccagctaattttgtatttttagtagagatggggtttcaccatgttggtcaggctggtctcgaactcctgacctcaagtgatccacctgcctcggctccccaaagtgctgggattacaggtgtgagccactgccctcagccaacatcttctttcttaaactagggtcctccaagtatgagaagtgctcaaacacagacattttctgttgtggctagtgggtgacaggtgagcatcctatctaaaggcagatggtggattttttgtacttcctctaaggcaacaatacagctttagacttctttgctaggaaaggacatgcagaaaagttgaaacaacaacataccaaatcacatcgtaaggttctcttcactgggatgtaccatcctaactggagctcacggaagaaactcttaatttactgacattacagagctaatataggcatagatattaaagtgtgcttaaatcaaccatcttttgctaggttaagactaaaaaataaaaaatagaggctgaggcaggaggatcggttgaggccaggacaggagttcgagaacagcctgggtaacacagtgagaccctatctctacaaaaaaaggaaaaaattagccgggtgtagtggcaaatgcctgtagtcccagctactcaggaggctgaggtggaggattgcttgagactaggagttcaaggttactgtgagttatgactgtgccactgccctccagcctgggagacatagcaagactctgcctctaaaaataaataaataggccaggtgcggtggctcacacctgtaatcccagcactttgcgaggccgaggcgggcagatcacgaggtcaggagtttgagaccagcctgaccaacatggtgaaaccccgtctcaacaaaaaatacaaaaattagctgggtgtggtggcaggcgcctgtaatcccagctacttgggaggctgaggcaggagaaccacttgaacctgggaggtgaaggttgcagtgagctgagatcacaccactgtactccagcctcggcgacagagggagactctgtcccaaaaaaataataagtaaaataaaataaataaataaataaataaaagatgggggaagtgtaaagacaacccacaaaatggaagaatacttgtaaatcatatatgcgacaaggaacttatatttacaacatataaagaactctcataactcaattaaaaaaccaaacaactcaattaaaaatagacaaaaatcttaatagagatctctaagtaaatacacaaatgaccaataaccacatgaaaaaaagtttaacatcactagccttcagggaaatctgattcaaaaccataatgtgatactacttcacgctcactaggatggctttaatcaagaaggcagaaaataacaagtgttgtcaaggaagtggagaaattagaaccctcctacactactggtaggaaagtaaaataatgcagcttctttggaaaacaggcagttcctccaaaggttaagagttaccatacgacccagcaattctgcctctaggtgtatatccaagagaaatgaaaacttgcacataaaaacttgcaccctggctggcacggtggctcacacctgtaatcccagcattttaggaggctgaggtgggtggatcacttgaggtcaggagtatgagaccagtctgaccaacatggtgaaaccccgtttctactaaaattacaaaaattagtcgggcgtggtggcggacatctgtaatcccagctacccgggaggctgaggcaggagaatcgcttgaacctgggaggtggacgctgcagtgagctgagatcactccactgcatttcagcctaggcaacgaagctagactctgtctcaaaaaataaacaaacaaacaaacaaacaaaaccaaaaccaacaacaaagaaaactggcacccaaatgttcacaacattatttacaacaccaaaaagtagaaactacccaagtgtctatcaactaatgaactaataaataaaatgtcatccatacaatggaatattgtttagccattaaaaagcaatgtaagtattgataaatgctacaaccaggatgaaccttggaaagattcactgagctcctctgagtaattttaggtatcacttgtactttcactcaggttagcaaaaaccagtgttttattcaacacattcatagtgactagttgaattccatttaaattaagattagacaatttattgaacattactgatttagctttcaaaaatactcctggaggcatacttgaacttaccaagaacataccaagaacttacaacagaccaacatgaatcccatctccagattcaaatgaaagcagtacctaaatattcctttgaacctttatatctattaaaaatacacaagtcatttacaaaagccaaaactgtcctaatatattattagtggagctatatgtaaagtacttagtgagccttaaggaacagcagcagattgatgagattacaactgcatcctaccttttactgagtatggcaattaattttgggacaggccttaagtgaaaaatttcccataacagtactactaagtacttgccttactttacacaaaaactgtaatctttcaagagtataacctccttttccactttaaatatttctgacacttgcactcatttcataacaattagcccctaagccctacattaagaagcatgcatctgaacctgagttaaaattgaacattaccgtatcttccatatttaggtggaccagtaagacaacatgacacgtaaggcaggagaatcacttgaacctggaaggcggagattgcagtgaactgagatcacaccaatgcactctagcctgggcaacagagtgagactctgtctcaaaaaagaaaaaaaacaaagacaatacgacatacctagattctaattcaacacagaaaatgcaaaacaaataaataaataaataaaataaacataaaaccaaattaggtttgtttactgtagaatcattttactattgatggggccgggcgaggggaaggaatctagacgttgtcacctccagttcgtcagtgctaggcttctaagcacttacaatgtcaaaaacaacatgctgacaagataatgttaaagttaatatattttaatctatcacttgcctgatactattctaatgaggagctaaacacaacaaaatcagaaaaaccacctccttaaaagttcaaacaggttgggcatgacagctcactcctataatctcaacactttgtgaggccaaggtgagaggactgcttgacgtgcctgggcagcatagtgagaccctatttctacaaaaacatttaaaaaattagcccagcatggtggaatgttcctgtggtcccactacttgggaggcttaggtgggaggatcacttgagcccagagtttgaggctgcagggagctaggatcaagccttggagaccctgtatccaaaaacaaacaaacaaccccacttcaaacatcaaacattttctgcaaggcagttttctattctatgtgtgaaacctttgttacgactcactgaaaatatgcaaaactccaagctgagcttagttttgcctgtgcacagagacctttttactctcattcttcgaaaacctcattttggatctcgctgccaacaccagagagaggaaagctggccaacaattccaaatataacacgcggaggcaaatgctacagaaatctgtctgacgggaagggaccatgctgaggtctgccgaggtagatgcacttctctatcagaccattttggtccctcagtctgtttggagcaaaatgccataagaaggtaatcacaggaaaccagtcagttttatcatcctgattactgatgccccatggtattcactctgtcaatgacaacaatcctaccaatctcaaacagaaagatgggtcagtgaaaagtaaagctgtactggttattctaatttttaacagattttttgggatcagtccagagacctttcagaaagctcaactcatggcatgataattatgatgaagtcagattcaccaagggacacttaaaaacatatctccctccatggccgggtgtggtggctcacacctgtaatcccagctctttgggaggccgaggcgggtggatcatgaggtcaggagttcgagaccagcctgaccaacacggtgaaaccctgtctctactaaaaatacaagaaaattagccaggcctggtggcgtgcgcctgtaatcccagctactcagaaggctgagaaaggagaattgcttgagcccgggaggcgttgcagtgagctgagattgcgctactgcactccagcctcggtgacagagcaagactccgtctcagaaaaacaaaaacaaaaacaccacacacacatctctttccaattctctagggacaggtttagtaacccctactatcactctgaataattgataaaccagttaaacttggataaaatgattacactatcacttaatcaaaaagacatcagttcttcaaccttaattctttggtgaggtcacggtactgagcacaagacaattcattccagagaatcattacagaaaacccagaaataggttcccagtctaactgggaagagatgacgtgcctcatacaaagcattgtctcctgagaaaagacaacaattaaaacagcttatttgactagtcatttccttactatttatcttagaaagatctcctgtggtttatagctgtgttaccaagcccgggaggtaaagtttgcctagaaccacttttggaacacttgtactggattccgttcacagtgaggcagactggcaaggaatactagagactgaaaaaagacttatcccacagagctttggatagagaaccacagcagcactgcaattaagacctacagcatttgcaaaatttaaatttcactttttctttaaattttgtagagatggagtcttgctatgttgcctagactggtcttgaactcctggcctcaggcgatcctcccaccttggcccctttaagtgctgggattacaggcatgagccaccatactcggcttcaaccttactcttgtactttccgtatggaaggaaaattatcattatcatgcctacctaaataattcagtcttagccagtttaaaagggaagccagaggaaatataaccttactctcacatgataaaattaagcagtaataggacaattttttttttttctcctgagatggggtcttactctgtcacctaggctggggtgcagtagtgtgatctcggctcactacaacctctgctgcctgggttcaagtgattctcctgcctcagcctcctgagtagctggaactacaggctcgtgccaccacacccggctaattttgtatttttagtagagacggagtttcactatgttggccaggctggtctcgaactcctgacctcgtgatccaccctcctcggcctcccaaagtgctgggattacaggcgtgagccacagcacccggctgggacaaattcatgaaaacacattcaagaataaaaatgttctgagacattaaatacttgatctaactactctgattgagttaataaaatacttcactctccagcctggccaacgtggtgaaaccctgtctctactaaaaatacaaaaattagctgggtgtggtggcgggcacctataatcccagctacttgggaggctgaggcagaagaatccgttgaacctgggaggtggaggttgcaataagccgagattgcaccactgcactccagcctgggtgacaaagcgaagacgcctgtctcagaaaaaaacaaacaaacaaaaaacaacaacaaaaaaaacttcactcttggtggaaagagtgtggcttcagacgcagaaaagtgagataagcctcactaaatgaaattcgtctagggaatacctacttaaaagacttcctgcctttgcaccaatatctacaatgctttgtgatttagataataactcagataagtcaatggtacattcagtattgacatcttcaaagggagaattggagatgtgaaacaagcactacttcatttacacattcacaaatctctgattaccagttcccattcaatgcctcaaaaaaaaaaaaaatttcaatgaaatgcacagtctgggcaagtctgaatctcaccaacagctaaagagtccctccttctttctcctttcatctaaagtggaaactgttaattgttacaacttgacaagactttagactcgtctaattaaaaaattcagaggttaggttttagagtttaaaagcccaatctcaggcaaaacagacagcacacttttcccatgcctgaggtttctaataaacaatttcagctttatcaaataagagagcttatcaaattctcactcaacatgcatgtcagcaatcatggttaacaccaatttcatcctaggagtaggacgtaagcccacattttaaatcaagaagtctacaactcagtcctggtatacataccaaacaaacacactaaaaaaatgtaagcaactgggaataactggtaagcaacacaacgtatattcaggcacaaatttctcctaagaatagcaaaagaaatgtgaccagaaatatcttctccaggtggattacaccttataggaagtaaaggctaaaaaccacagacccttagtcacttcataataaaaattttaaagccagcagcaaaacttcctctacgataatcatttttgtcccagcaattttacaagctgggatggggtgccctcctgggcaaaagtatcttgggaatggtaatgggagtttcctacataacttctgaccataaacttaatttgctcagtatcagtcatctgtctaataagtgttcccaaacctgcaattagtacaaatatacagtagacactactccacaaaccgagagatggaacgtgaatggaactgttgagagaccttcggtgaaatttcacttaaaacaaaataaaaagagggctaaaaaaggcaacatcaaacaactggtgggaacacagaacagcccccttttcctctctccagtctggctcctctctcaaacccctgcctcagtcaactgttgcagaacaacagaacgagacccagtagaacaagacgaaatctgggtttgctgccgcagatgtgggatttttgtggagggcagaggtgatttcggccggcagaagatggagtttaaactcttctttgccggattgtcctgggctgagccgctgaggaggatcacgcagcgggcgatcaactcaggtccctccctctcggttcggtctctcccctcctctcatgtccagtaagggggaaaaagcgtacggctttccagctctcagctccttaaaaatgcctttctagtgccaccgcacacaatcctccctctggcagcaaagaattttgcagcgaagggctcgccgatccggagcggagaaatgaaatcggcgcccaagggcaattttaattgtctaacccggcccgatttcctaagaggcagcggcgccgggagggaggagggaagagggaggaggaaggaaggcagctctgagaggcaacagggggcaagcggaggcagagaaaggggatcaaagcggcgagatcccagacggggcccccgaggagcttctgcagaaaggactctggggctgtccccaccgttcccccgagagacgtttgcaaatcatatatgcagccaaaatggcgctgagaataaaaatataatttaaaggcaggtcgccatattgtaaacagagaggcaaagaagaggcggactcgagagacaccctccacgattttttctacagccacaagcgcccggttgccggggtctggaccagggcaactcaggtggccgagggctccacgcacccaccccgaggagatcccggccgggcaggagccccgagggcagcgggcgcgcgggcaggcaagcggcactgggcccggagctcctccccttcctcccccgccactgccggctgtccccggccggctctgtcccggctccccagcgacttccaatcccatatggggttctcttcactcgtcccaacccccacctcggggtccggacccaccgctgctcctccccgctaaactgccagaacccggcggacacctgggggcggggaggtgctcgccccggcagctgcagaaagtcagctagcggctgcaagcgcccgttatttcggcagtcaggggcaggccgggtgaaggaatgcgcagagaagggtccgccaagaagctccaaaagggtccccagaccttaccagcactggaggtggaaggcagccgggcagtggtcgcagcacaggagatctccaccttccttgcagctatcgcagctgtcgtggttggtggccctgccgcttctccggggctccttctcaggcttccgactgcgcttttctgcctcgtccgtcttggggggagccagcagagcttggatttgctgcacacacatacaaacggcgtgtgtgcacactcggagctcccgggcggtccgtcgcccccccggcgcggtttctccgtcacccacccctctccccccttttgtccttcttcctcccatccaggctgctcccagaatctctcagcccccggaaccagggggagcccaccctaaccgcgttcctgcagcacaacaacgagaacagcttcttccaaatggggaggatcaagggtagggggatgggaagagggtgcgcggttcccttcttgccacttccttgtatggacagtgggggactccaaagacccgctcgggagaggcccaaagcccggtacccggacgtgctgggggaagcacaaaggggccaacaagaagggggtggggaggcctgccggtgcaacgagatggagtgggctggcgcctcgggagagcgaatcgagggcggcgggtaggtgaaactgctgcaaacgtcctcggaggctgagctcagccccctaaattgcaaagaggggagggagaggctaggtgaggaagaatccccctccctcggccatctaggcgcttcgagtttaggactggctttgtggggcggagggcggaggttccctcccggcgctggaggaaggagatgaggagggccactcttacctccatcagcccccctgatgtgtccaagtcgtacacgatcgtcttggtctccattttctcccacattcatccacctcccgggctgggtgctctctgctccggcccccccaaccccggggggaggggggaggtgaggggagggggcgctcctgaccccggccccgcttttttcccaatacgggtcccgacttcctcgccctggctcccccccaccccccggcccccagtccccgggacgacagcgtcctcccgacgggccgcgaggggggagcggcccctcagtcccggcccggctgctggctgcacagtgggtcccggctccgggggtcaggcctcggcggggcctagtcccacaggctaaagccggcactggcgacagccggtccggccgggaaggctggcgggcgctgccatcccggggctgggggtatcggagggggggtgagaggttacgtgaggttgtggtacgtgaggtgactggggggagggtgatggggggtggtccccgggctccgcctctcgccgccgccgccgtctgcgtcccggctgccgcgcacttggcgcaaacttaccgcgagcgcccgcaaagccacccgcgcaggcgccccgggatcggcgctcgccgcgcgcaaccgcagtgacagccggcggcctggctcccgcgcagccgcggtgagggagtaccccccagcgcgcagccgcgctggcattcgtctggaggaccgaagccccacctttctgccctgcgccagcgcactgagacaaaagggcgggacctgaggtctcgcgcaggcgcttgagaaagcttgtaggggtcaaggcgcagccgcaggaagctagggactgttcatccattggtgtttgtgtgcaaactaagacgactctgttctgcgcaggcgtgttgggggtgctcccccttcctctccataacacagacgcctcccgcgcaggcgtattgccttccgcaggccctcacaagaaagctgctcctttcgccattttggtaatgggatatgggctatcatgcccttggagtcctcaggcatgaacagaaaggagcaaggtgtggtgttggatggagctggtcgcctgtcggtgacagcagtattcctagggatgttgtacttgaccgtttggttctaccatcgggtgtggctggaccaggccaccatattggtaaagagaaaagccatttgagacagaaaatgacgcttttggaggcgtgtgggatgactgtggttcctaattctctcccgctcctgacagataattttatcagttaattgtatcctcagcatccctgccttgcgtggtggtggcactggagagttccgcctgcccgttaccaccctctcttcaccactgtccctgagatctgctcttcaagaggaagcctaaagtggagagtttgtaatcctgacaacgcccagctacctgcgtaccccggactccaactcccagtttgcaacgccaaagggtctaaagggcgaacgggggcgcattgcatcctgggagcaagaatcgcgataggtctgatggattgtgggaactgtagttccatgtgcgtgcgatgcactctatggtaggatagacccggggaagagtcatttgccggccaggaagggatacttttgagagcgtcagtgctgcatgccgggatttgtagtctgagggcccgcctcgcattctgggcggggattcatgctccttttcagggcgcccgctcctccccttggtattgccgtcagagatgggcggttggttattgctgcctgatggtggatgaagcagtggaaaagagaattgtatcgttgtgcttgacactaggggtttagttggaattgttgcttcgtagctgtgctcggcccacttttaatgttaagggacacagcattctcagagtcgtcaaactagcaagggtttagagaccatctgatttaatcccctcttttccagatgcacagggaggcgcagtgatttgcctaggtcacatagtgcatttatggcagacctaagaattggatttcttgattctcaagccagacactgtccattacactatgtcgactgtgtctaaggaattactatgcttgctttggggacagtaaggaggatgagttagacagagtggggatgtcagtgtatggagtcttaggtttctgttttcctgacttttcgcttttctgatgaccctcttggtgcctggaaagaatgataaggtcatggatggtggggtggagaatgtcatgtgaattggctgccctctgctttctaccattctgagccaacaataaacttcaggagctgtggaccagagatgtggccatcagagaggggagggctgagctagattgtttgtatgaaagaggcaagattttctatctcctatggctatattttatgtcacaggctctcagagtttagaacctcatgtgccctctctctttggctttttttcctactgctcagggcccagctgtgctgctgtgttaacctggaggcattatggaacaggtaagtaagccattggcatccatccactggacaaggctttgctttgatcaacaccatcaattgcagctgataataggaactatgggctaatgagggaaataagacttggctctgttgacaagagccagggaaacttcacacctcttcctcttggaacttgcaggatgaggttaggccagtggggccaaggaatgctcccaccttggagagctcccgccctgacagttgaggggggattgaggggcgagcaggtgggatacagacgcctttggaagtgacctcttgtggctaatctaggcactgcactctgcatggacaagagcttctccatccttcaaggtggcttgtgctagagccaggggtaggcagcatgagtggtcaagacttcccttttggaagactgtagaagcagaaggtgctggttgctgctattatttctttcatggatttttctctactggtttctgagctcccataatttcctgttgcctgcctcttgctgtcactcttggagagcagcaatgcagggcacacctctcagcatggaatgtgcatactgggggccaacgctgggcactttccatctttgtaggtgctggggcccatagggaaggggcaaacttgagcacatcctcccagccacctttttccagagcccatggttagggcctttgcctaacttaggatccaagcccgtaagctgcattaccactgctcctgacaatctaagggttttgtaaggccaagccagattagggcttcatgttttggggatcagtctctgtttcctattctaatttcccaagccttgcttacttagaaataaggggaaggagagatgcatcagacttcctgagcctagttagcattgagaagggcatcagtggcgttgagaagggatttgggagtgtgccagcctgtagttctggacctggcaaagaggaggaaataaggcattgggtggatgtgcagtggggttcctgggctcccacatccctgtaacatcagccattggggcctctgattttgcctgctatctgttgcactgtcccttttggtacaggggaccctgttcaactgcatgcaataatttcttttaaaataaaatctgagcactttgggtggctgaggtgggaggatcacttgagcccaggagttggagaccagcctgggcaacatagtaagaccccatctctacaataatttttttttaaattagccatgtgtggtggcctgcatctatagtcttaactattcaggaggctgaggtggatcacttgagccttggaggttgaggctgcagtgaaccgtgatccagtcactgcattccaccctggttgacagagtgagaccctatctcaaaaacagtagtaataaaataaaatctgaagatgattgattggtgggtctagcatgccttctggtcctgaagtccatatcccatttatctcccacctcccgtccctccaagaaagcatcattcacctggccattgcttttttttttttttttttttttttttccaaaaacaccattttaataaggaaacaacagaaataaaagattgttctctggctggagcccagaccccatataatacattacatgtacaaagtggctttcagccagctcctgggcgtctccctggggctctcctaccacctgttccatgccaaattcctgggtccttggacctctgctcctctccagaatatgcccaccccctccccttatcccataacacagtggtcaagaggagagcctgacaagtggctggaattggaggagggactattagggtgaagatgtttgcaacagctaaataaacatcggaggaaagtctccctttcctcagggtatagggtggtcagtggaaaatggcgtgtcctgctttggtgtggagcatgagtgcccagggaagcccaacctgaggtgggggtagggtccccctgaaccccttaggatctcctagaattactgcctccactgggacagggcaggaggcagaactgtccagaactttagagaactagagacctcccaagaggctgatgttggcatgccaggactacccagaggtcaccgttgagaggagttttggccattggtgatggcgctgtgaggagtaccctggtgcagttcccaccatggtcaagttaatcctgctgcaggttgccatgccagggcgggatggtggtcatgtggagaaaggtactcctgctctgctagtgtgttccaggctggtccagggcatgaggaggctcaggatgctggctgttgatgcttgtgctccagctatgttcttcccacaggtagatgccccctgacatgggcccaatgaagggccccaagtgggcaatgacaccaagaaaataggccatggtgggcatcgcaggcggggaagggcacaacttcttgagggcttggtggcatctcctcctaggtggtatatacaggaggtggagggacagcaggaagcaaggagccttgctgctggactgtggtgcaagtctgagttgacttccctagactgcccccacctagatggagacttcatattctctcgtctcctgcaaaggaaagagactgctgggagttggaaacttgtattaggtttgccaggccataattcaccttccctaggaaaagggaaaaagtgagagggcttggcaggaccctcagggttatctgcccaaagaagcaaagaactgggtcttggatagggtggcaaggctggcatggttacttactccagtctcgtaagttggattgtcaaacgctgactctatggtaatgcggttgtaggggcgggggcgggggcggggcagctgcagggagctttttccctggagcctgtggggcagagaagcctgcaagtcaggagcactgggtaggagtgaggtatgcaggtatgcagagcagaaagagaagccagactcacctggagaagtagaagtatacacctcctaccaacaacaccatcgccaccagtggcaagaagatggcagctgcaatgtgggcagcatccagggtgctggaggcagcaggtgccttggcaactgaagacacagagggtgtgactggagcagaggtctctgtcacctggagcccatattctctcacctctgcccaagggcatctgactaccagctccctctagctggctgggtgtagggaaggagctttttaacctgctaggcccaaacctctctctttctctgccctccctccttgggaagcccatgacctgggagccgtgagaaccaggaccagggagaccacttctctggcctcaagggtggagacttaccatccaggctgcgactgttgtagaacccatccagagaggctggaacaaaaggggagggccaagggcagtgagtgagcccaatgggccaaaccactaaggcagggagaggaggtagtgggatgatcatgggaaggatttgtccaaggagaggccactccagcatttgtcttggtgatgccaggtcagaaggatctggcagagactggggagaccaagggtaacatgaaggtggcatgggcaggtggttctggttctaaacattggacatctttgccagagcagctctatgggccagggagggttttgaggggtgacagggcactcaccagccctacagatgggtggggggtcactccaatgcgaggggtgcccaggcacacacttgatgctggcctggcccttcagcacatagccaggggcacacgagaagtggatggtggcccctgctgggtgtagctgcttctcaggacttcgggcaccattctcaggggcactgagaccatggcatggcttgagctgttccactacaaagcaggcagagtgcagtgagggtgtcatgcccttggcctccagggcagcatcttttatctccagctagaggttttccctcctactcaattgacacttacggagacatttaggggcccggtcactccacttggggctgccagcctggcgatcatggcaggtgaggatggagctgcccatcagcacaaaaccctggtcacagatatattgcacggtggcccccacgggaaacttggggctggatatgaggcgtcggctgtgctccacatctccaggatcgtggcaggaagtcactatgggtagggggtgatggggagaagtagcccaaggagaactaagcagaggccaatccaccctggctttgttccaggccagctaacttcttcatgtcgtatgggtctaccccctacgtatctgtccctaccattatgctagtgtgtccccccatttgtccccttcccatctattaggttcgataaaaactgattggccatctaccaggaatgaaatacttagagtacgtggctgataaccccatgaaaagtatcatccccatttcacagatgaggaaactgaggctataagaggtgaaggaactttgaagatactagctaataacagctacagtctggttcagaatccaggagagaggtttggagtttgtgttgggaaggggagcgtggggaacaggtatactcacccctctggcatgagggcaggtcctcactccaagttaggtcccactggcacatgaggacactggatcccactacctggtagccagggtagcactggtaagtgaccacggtgccgtgcactagctcaggctgcgatgggctcttccagccattggggatctcaggcagctccggacatgtgtcattgcggggcacctctgggggcacagaggcacaagatgcaggccctcggccagcaccaaagtgactgtccccctcaccttgagggcactctggctcctgctagtttgtcctggacctagactgtcctgggcgggctcagggatccattcctccctgctcaagggcccctccttgactgcctgacattgctctgtctcctagattccagggttagcatttaagctttggccttacttccaaaagcaccttgaccagttccttaggcctgagagatggggccaggtagggtgagggaaatcgtcacttctatgaaagattgtcagaaagatagaagccagcacctttccttagttcccccatttttgtttgaaagttgttctggccaggtgcagtggctcacacctgtaatgccagcactttgggaggctgaggtgggcagatcacttgaagccaggagttcgagaccagccaggccaacatggcaaaatccggtctccactaaaaataaaaaaattagccaggcgtggtggcatgtgcctataatcccagctactcaggaggatgaggcacgagaatcgcttgagcccaggaggtggaggttgcaatgaacagagatcacaccatggtctgggtgacagagggaaactgtctcagaaaaaaaaaaaaaggaagaaaaagaaagttgttctgctgcctacccaaacccctcttgccactatagaattctggctctccctcagggcagatggagaacaggactagcttcctccaggtgatccctggtgcttttccagcttactcttgtctgagacagcattcaggcacctcactgccctagcctctttggcttgccatggcttgctgtctgcactctgagtggggtagggacaagctcaccaaagaagtggatgacgaagccctgctggtagcccagcactgaggtcccggggtccgactggaactgaatggtgacatcagccatggaggtaaagagcttgaagtggctacggggccctgagtactggcccagaacccgggccgtcaggtcatccccatcatagaaggtaagcacatcaccagggcctatgcgcagcctgtgaaggaggagcgtcagggcagagccggcctgggggcccgaggatgggctggacaagggatatccccagacctcaggagttggctcggcctgacccggtaggcactcacactcggatgtccagcatgatgcgcttgtcctcttccacatgcacaccccagatacaatcctgcccacgaccgtagggctctggccagttgggagagagtaccacgccagccgagtctgtgatctccccgctgcacacggctggaaggcagaggaggcccagaagggtcttttcaagcttaccatggtgttgcttaccatctgcccgcaggagtgcccacaaattgctgggaccccccacctcctccttggaggaagcctgaaccacgcatatcacagggcccctgtggccccgggctctgctgctattctcctggtatgaccctgccttttgcccggtaggcccatccactggtgtctactgacctcggcaggctggctctgtctcattccactgggggtcgtgggggtcaacacactcgatgatgatggagccctgctccagggtgtagccagggtcgcagctgaactccacagtggtacccacagggtaggtgggtgtgctgctgctgaagttaccgtatttgacaaagggctcatagcaatggccctgctggaaggctgtaaaccacaggtcccagcccagctcagccttgactggtattaaacacagtgggcaagcatccccctacttccctccccagagcctttcttttcctgggtacgaatgacaaatatatgtcctggggttggagcaggaatgtgatggaggagggacagccaagagcatccatccctattatgctcaggaggccatcttgattaccatcctgttcccactgcctggttttgtgcttagtacacagaaggtactccatacatgttttttgaatgaattaatcaatgcatgcatgcataaatggttctagaatgtctcttacagcaattctttcttaagggttgaggccttttttgcttttcaaaatctggagaatttattcccttggaccatagggcctgggtccaggcagaggtttcctgcaaagctgtggtagggatcccggacccaaagagaggggcagggaaagggggcctaagtactgagtgagcaggggctgacttggaaggagtgacagcatggaggcagagaggggtagggtgtgggagaaagaccctaggcccgagcccatccccgtggacccgccacccccagtgaggccccagcaggctcaccctcatagcgcagggccatgcctgcagctgccccgctgctgtcagtactgagctcaacaaagaagtgtttgccagagctgagcaggccctcaatgggcaggtattccacctcataggaatcatacactggtggggcctccacgttgtccccattgcgaatgatgagcctgaaccaggagagtggcagctatgtaggctggtggctgacccagatggggtgtggccccaggcttgggtagcgtccctccagcagggtattaccaggccaggcactcccattccactaggacagcccctcacctgtcatcatcctctgccagggaaaccttctcaaagtgcaggtgtagccgctggccctcaggagcctcaagcagccagtgacaggtgaggttgttgctgtagttgcccgggaagcctggagagacgatgcggccggtggtggcattgcggatcactccgccgcaagcagctgttaagaccaggacaggacgtaggctaggcccctgcctgaacccaggcagcctaacatgccttcctccctatcccagccctatatcctctgcttggagcagcggggaccttgcctccctgccatcttggccctcatcgtcctgaaggtcaaccttttagccctgtgaacctgcatctccaggcagcctgagctccagaatcctgccgcctaacctttcacacccctgggactgaccagggtaactctcttgactgtgggtagatgtatcactgcctggttgtgtgcccaggtaagtcactttccctctctgctgacttctctagaaggccgactctccctaggtagactttactaaagcccttactgtgggcttcaaccttcttggatacatctgctacttctacctcatgccactttcctaaaatcagttgtttgggtatgtcccttaactaggaccccctggagcaggaaccaggtctttccaggccaggcacagagttggtgttcagcgttggttgaataaaatgagtgaatgaatgtaaaaaggggttagcactagatccgggcggcaaacacctgatgtgcatgccatccgccccggcctcactaccactgccgttcctgggctgactgacctttctagtgctgaccctactggcttggggctgtcctctctttctaaggagagactgaacagtttgcctatggctatctgtgaggattgctgggttacttggccacaaactcctggcggttatgtgaggccagagaggggtcctcaggcaagaggagtatggctggttccaggcagtgctttcctctcctggacacatagctctgacctacccaactctcagagaccaggctgccatgaccaatacacaggacctttgtctccaaatgctcaaggcagcagaatattgtaacctagtaaagctcctggggggctggggcaagtttcttctctgcagaaaggacagacctgcctcagcttggtctcagaatggaactgcccttcaaatctgatcatgccccatcctttgctgaaaattgcttagtggctccccattaccctcaggatagagttaaagctgaaaatggtgttcaagccctttatgaatccacctctctctagactcagcttcagtcccctctccccgcataccctctgcttcaggcacacttcactgtgtgctcactatcttgtgctatttcatgcctgcacatctctgcatatgcagttccaggaacccaccccactttcccaaactaatatttctgaaatccttccatgctgtctccttgggaagccttgcttgcctcctctctcatcttggagtagctctccatcccttgggctcctccaccactctgcctttactcctattgtagcatcctctgcactgagctgcttgccagcctccccgctagatcctcgagggctgagaaagcatctgtgttattcaactctggttgtgcctggcacccaggaagaatttatagaatgaaataagattcatggctgggtatggtggctcaagtctgtaatcccagcactttgggaggccgaggcaggtggatcacctgaggtcaagagttcgagatcagactggccaacatggtgaaaccccatctctactaaaaatacaaaaaaattagctgggtatggtggcatgcacctgtaaccccagctactctggagggtgaggcagaagaatcgcttgaacccgggaggtggaggttgcagtgagcggacatcgtgccactgcactccagcctgggtgacagagggagactccatctcaaaaaaaaaaaaaaaaaaagattcaaaagcctaagcccatacccactaaaaagaaaaagcccggccaggcacggtggctcacgcctgtaatcccagcactttgggaggctgaggtgggtggatcacgaggtcaggagatcaagaccatcttggctaacatggtgaaaccccatctctactaaaaatacaaaaaattagctgggagtggtggcgggcgcctgtagtcccagctactcgggaggctgaggcaggagaatggcgtgaacctgggaggcagagcttgcagtgagccgagatagcgccactgcagtctggcctgggtgaaagagcgagactccgtctcgaagaaaaaaaaaaaaaaaaagcccaagttgcttttcatactgcaaaccaaacactgagtcttcctttctccaacaagccccttttcattggcagcaatcccagacctgatcactcaggaccagacctgggagtcccctttcccttttcccagttcccatcagtttctggaacttccctctgcttcattccccaaatcacaatctaagttcaaactgtcttgcctggctggcctcccagtcatctcctgaggaattctaaggccctcccttctcataagcttcaacagctcctcagcctgtatcttgccctgacactcaaggcccttccattgccacatgtctcaggcttcagccaaacctggctgtcttctgtgtccctaaacaccctcacctgcctgcctctatgtccctgcccacgttgttctctccatttaaatgtcaaacctgcagtgcctcctcccctaggaagcctcctaaatgtccagctaagaatgattgcgcccttgcctcccaggtcactttatgtcttttcattggtgctttttacttcttcccctggaaattggtgacctctgtgctttctcctttctccctttcctggaaatgtgggttctttgagggcagagtccctgtttaattcagctgtttgtacctgtggtgccttcatctggtagatgctcaataagtgcaggttggatgaatgccactgaggtgcatggccattttctggcttccttatgaagagcaaatgaaagtggcagagagcaacagagagcagggatgagcccccacctcacttctctgctcagcactgagccctttcccctgggcactcaccgatgcagacgggctcctttgaatcccagaagggctgggtggcattgagacaggtgagatgcctggcgcccttcagctggtagccagtggcacaatggaagcgggcactaccccctgggtggaggctggtgacagtcacatctccataagctggacgacggggaaagtggcagctcaggagataggctgcaaacagagaacgggtgacactgtgtatgtgtgcagggtgggggcgggagctgggccattggttgggggaggtctgcctcagtctgcctggaggtgtcatttggggccagaggaagcactaggagttccaaaacaactccaatctcctccctagaaggttaccagtgatatttccagcagcctgggctggttagtggagcagacagagctggaaattagaagggttaggttctggctcaagctttatgacactttaggcaggttatttaatctttgtgtgtgtgtttcctcatttgttaaatgaggtttaaaatcctagcctacctacagggttactgtgagaagaaatgatagagtattttatctagcttggtatctctggtacccagctgatattatatcttcaggaaatgcttattgaatgactcgtagacatgaaagcacttgaaatagtgaaaaacctatacagatgtaaagtgttgatactgtttttcctttagggaataaatatgaattgcagcagcaaagagtgaaatcagacagtaaaggctttcccagtattcactgagaaatgctaaaaagcttgatgccaatggccatggacttcttttaaaaccagaatggtggccgggccggtgtctcatgcctgtaatcccagcactttgggaggccgaggtgggcggatcacctgaggtcgggagttcgagacaagcctgaccaacatggataaaccccgtctctactaaaaatacaaaattagccgggcatggtggcgcatgcctgtaatcccagctacgggggaggctgaggcaggagaatcgcttgaacccgggaggtggaggttgtggtgagctgagatcactccattgcattcctgcttgggcaacgagagcaaaactccatctcaaaacaaacaaacagccgggagtggtggctcatgcctgtaatcccagcactttgggaggccgaagtgggcggatcacctgaggtcaggaggtcgagaccagcctggccaacatggagaaaccccatctctactaaaaatacaaaaatcagccggacgtgatggcaggcgcctgtaatcccagctactcgggaggctgaggcaggagaatcgcttgaacccggcaggtggaggttgcagtgagccgagatcgtgccattgcgctccagcctaggggacgagagcgagacttcatctcaaaaaaacaaacttacaaacaaacaaaatccagaatggtggtaggctggggcaaggtgggaggattgcttgaggccaggagttcaagagcagcctgggcaacatagtgaggtccccatctctgtaaaaaatttttaaaaaatacccaggcatggtgatgtgtacctgtagtcttagctactcaggaggctgaagtgggatcgcttgagcctaggagtttaaggctgcagtgaactatgattgcaccactgcgctccagcctaggtgacagagtgagtccctgtttcgaaaaacaacatcaaacaaacaagaaaaagatggggacgagggtagggaggcagtgcactgccttcatggaagttggggaaagaacaagttgccctgggaaagctggtagctttggaattgtcataccaaatttgaccaaatggtggcagcaaatcctacaaaacaatctggcatatcccgatcctggggtcaagctggggtggtagctaaaaggatcaacccggtgcagtggctcacgcctgtaatcccagcactttgggaggctgaggtggacggatggcctgaggtcaagagttcaagaccagcctggccaacatggcaaaaccccatctctactaataaaatacaaaaatattagctgggcatggtggcaggcgcctgttatcccagctactcgggaggctgaggcaggagaatcgcttggaccggggagatggaggttgcagtgagtcgatatcatgccattgcactccagcctgggcgacagagtgagactccatgttccaaaaaataaaataaataaataaaataaaataaaataaaataaaagtgaagatccagctgggcacggtggctcacacctgtaatcccagcactttgggaggccgaggcaggtggataacaaaatcaggagttcgagaccagctaacatggtaaaaccccatctctactaaaaatacaaaaaaaaaaaaaatgatctgggcatggtggcacgcgcctgtagtcccagttacttgggaggctgaggcaggagaatcgcttgaactcgggaggcagaggttgcagtgagtggagattgcgctactgcactccagcctgggcggcagagtgagactctttctcaaaaaaaagtgaagatcctggcttgcgtctaagaggtgagagcaaaggcctggaggggtcaaggagaggctgagaggcttgtgctacagagcctgataacccttggggtggtaggaaaagtgaggactgtctagactgaagatcttgggtcttggggtagggggcagccccactgatggtatcaggtaaatgggaggagaggtccatgcaaggcctctgttcctgggtgcctttgtgtgaatagaaaaatgggccctctttcttcccccccattaaaaagaaaaagaaaaagaaaaagaggctgtctcagggcagaccagggtccagaaatttgagttttatgactttcacctgtcctgttactatgtctgtgaaagtgggaggagaattcctcctcttctgtctctcatggggctctggagagaatggtcggtaagtggctagttgtgcttggcaggcagtacagggcagtgcttagcaggtgggctgtgggtcagactgcctgggtttgaatgcaggcttcttccctacgtgctgtgccaccgtgggcaagttacctaaattctctgtgcctcagttgcctcatttatccacccactttcagtattacatccaaggttgtggaggttaagtgagaagacatatgtgcagttcctgaacaaatgcctaagacatcagcctgctgttattgtttgtaatcttgattaataatagcacctcacatctacatgtactttccagattctaaaatgccttcacactcttctttcttgatgtctacaatatgcttgggagaaaggcaggcaaggtaggggctatgagcccattttcagatgagaacaggttcagagagaccctgtgccctcatcacacagcaaggaagtactagaccaggaacttgaagctcctgggctctgaagccttcttgctttccaccaccaccccacctgcttcctcatttgaagtagaaacttgggttcaggggtcagagaaatctgagagtaacagacaagcctgctctgggtggttgtccagggcagccactcacagtgacctggggagaggtcccagtccaggatgggatggagaaaggggtgtggggcaccacacccagagtggaggaggttaagaggttaactgacgcctagtggggtctagaccatgagccaggctcaggcccagcatttccccttacatcttcccctttgagttcttatcaccactctagtaagggagggccctcgtttcacagatgaggaaactgggctggaatggggtggaactgggctggaactgtaggaggctgggggcagacaatgaagcccccagactccatagtagttaaagtatcacttcccaggatgagcttcctcctgttgccatgacaaccgttcccggggagcctgaaccactgcaatctgttgagttattttctcactggagtctgtttctggagccaagtccagtgccaggaatgctgaggatgcaggagggggatgtctgtcagggccgtctgcctccccaccctgcctgaggctgtgggaggggagttgacttggtcttgcgataaggcccttgtgagggctcatccttgtgacctccaacatcagcttggacagctcgagcacaggtgtgggtactaggcccctcaccccctcttctggcaccctctttctctagcccacggagatttgcgtgtgagcacacgctcctcctgttcccatctctgggatcagggctaattacagcctataattaggggaattacactcattaaggcaagagctgatcattgacaaaaactgggctgacgagggagggcttctgggagctgagaaggaggcaggaccaggccagctcttccagcccttccttggaggttgctcccccttgctgggcctccagctcactgccattcagccacctttgtctggcccgacagagaggaggtccggagttttgtgcaaaggaatttgcagcaagagagaaggttatcatggcgtgaaattatgcctgctgccagggaggattgatgagccattagggaggctagctgggccgcctagacgtttcacccttgcctcagctggccccttgcctctgccaagccactctacagccccatccacttccaggctccctgctgctatgccagactgctccagtagtttgggtggaggggtgagggtagggtgagtgctccttaggtggggttccaagcagccccatctccagagtgctggctcttctgcccggctgtggtcccctgcaggactgcggaagtggtccatgacaatgcaagacaatcccttgattgttcacaccaattatttccgtattagttctccctagtctcaaatagttaacccatgcaaaggatcgagctgactttgtgctcagagagggggatgggtaggagggacacagctgagacagcggcaaagtcctgagccccttttcctccctctcccatcctgccagtcatgtaatactggtttccttaatgaagcatgtgctaagcacttgacatgtaccattttgcttaatcctaaccatgactttgtggggtaggtgttttggtttcatattacagcagaagggtcagagaggtcaaatgacttgtccaaggtcaacagccaatgaggagattcaaacacagatctgcccattgcctgagtctgtgattttttttcattacatcgtgctgctcccttatttccagaggtgttctgagctgattggggcatgggccaggtcaaggtgggtgaagcagttcaggaagggcagtctggcagctaagcagatggtcattgtcagatccctttgaccttcaccctcttgcatttggggagggcttctattgttattgcctgtttaagtgtctgcctcctcctgagaaagaactccttgaggacaaggaccttggtgcatcctgacattgccagtgtccagcacaagcctggcaaagagcaggtgcctaggaaaagtttgctgaatgaatgaatgagggacaacgggcacacctagaggctacctgatcctgagtcaagaccagctctctgcagggtggtgggtggaagagagaagatcctggaggtttcagatacgcgatacttacctccaattgtccagagcttcactggacatttgtgctatgtgtcactagcccctctctgctccttccctctaggatgtaattgcacagagacccccctccccagcaaggagggcagcgagtctgggctggttccaccttcaactacccaggccttaccttggtaatggaaatggaaggtgccagggccagccggtggcgggaggctctggaacctcagggccgcttggtgggtggggctgcggatgacttggccccgcagcaggaaagactggttggccaggggcagtgggtcaggcccccccaggccttccacagtcactgtctccccttcccggaggctgatattctggacctgtcagtagagtagagagagaaaagcaaagtagtcagacttcttcctgctgcctggatcctgccgccctcaggatcctgcaggccccgggcagatcaatcctcaatgctacttgagcatcggagcccccaggccctgagctgggcacttcagcagtgcaggagttgctcatctcagtgtgagacaggaccggaagttcagagattaagtaaattatccaaggtcacatagagattcttagcagaactggggtttgtaaacacatctttctgtctccaagcttttcagatacaccagctgcttcctgtcctgcccctccctgggctctgttttctcatctgtaaagtagggatggggtaggtgtattgaaccagatggtgtccgaggccctggtcagcagtatgaggtcttaaatatcagatccatgtgcccagcttcccctggacatccctgttggatgcttcacacccagcctgcctcatgctaggtgactgtcttcccctagccagcagttcccctgggaatgatcttgctatctccctgggtgtccaaatcagaaactggcatcttgcctcctccctcatacctggtcagtcattcagtcctgtcaactggatctcaaatctgttcattactcttcatccccactgccattccccagcttatcgccgttactgtgcacctagatcaccgcagcagcctcctggccagccttcctgcctgtagggcttaacccactcctccctctacagcagtattttctgaactatagccagctaacggtcttagatctgttgctgatcatggtgcttccttgtttaagtcctccagtggctccccattgagtctgtgaagccgataatatgtagttcaaactctttgcttagccctcaaggccctgcccaacttggcccctgctgactgtcagctgggccttacaccatgcccctccgcatgtcaatcgtgattctctcttttttctgagcctctttctccgatcctttcccctggctgtcacagtctcctctgctatcatgctgatcttcaggccctcagtcccttgagcatctttctgggctccatgcctccattcaggcaaacaaggattggacaacgacggactctgcccagagggaaattagcagcatggcttgatagaaggaacactggattgattgggagcccagaaatctgggacctcatcctaaccatgtgatcttggacaaatatgctgctatttgaacttcagtttcctcattttataaaacgaactagtggagttctttgctacttaaaatgtggttcttggaccagcatcagcagcctcacctgggaacttgtaagaaatgcagaatcttggctgggcgctgtggctcacgcctgtaatcccagcactttgggaggccaaggcaggtggatcacctgaggtcaggatttcaagaccagcctgaccaacatggagaaaccccgtctctactaaaaatacaaagattagctgggcgtggtggcacatgcctgtaatcccagctactcaagcagctgaggcaggagaatcgcttgaacctgggaggcggaggttgcggtgagccgagatcgcgccattgcactccagcctggacaacaaaagcgaaactccatttcaaaacaaaaaaaaaaaggaaatacagaatctcagacccactaaagcatactctgcattttaacaagatcctcgggcaactcaaaagcactgatctacatgggctcaaggttcctaccatgttgctctgaagcagggtttcaagggttgaccacctgggatggttaagtggcatcagtgagtcaccaaatccttcccagtcttatttcccaaatactccaatgggttcctcctctctatccttttgttactgtcctggccctaattacctcctgcccattacttttcacttgagaatggctttctgtctgtctaacacttcccatccccaactcatctcctgctgatttcagattgcctggaggacaagctccaaactgcccagctcacatttggtgccagtatctctgcggccctcattaacgtgcactgcagccgcagaccacccctcacttctgccccctgggcatccacatatgggactctgcgggggcaatatcttcccttcttcccctcctggtgaagctggtcatcttttcagatcttagggccgcatcgtctgcctcccaggctaggccagcagtccttctgtttcagactctccccactggcccctgcccatcttgctgttaaagcccagggtggcatgttgggtcacagtgccctcttcactggccagtctcaacaaagacgtgtggaaagagtaaatgtgtgggctgctggagagacattccccatcagatacctgtgagctgagaagcatagaggatgctgagcccagccaggtccaaggatatggctgctgcgaggctcagggcccctcagactgggtgctgagaagagatgtgccctggggactccagaaggggcagctgggcagggagaggtccctacccctgcctgagaggaaagacctggtgggtctttgggctgaagagaaggctcaaggcagggtgctggaggccgaggcgtctcctctctgtgagaaactctccacccaggcacgtttgggcggaggctgcctgaccatctgctggggacattcctcagggaattcctgcagcaggcggaggctggatgaggtcccttcaaacttggagattctgtgattctagagttgggaaaacaagactcacacacgtggaatctgtaattatcgagagatgccaggcagcatataattccgccttaagtggcactgaatgcaggcagcaggaatcctcggggggagagcgaagggctcagaggctcagggaaagtgcctgaagcaggtgggtctcagagtgccttgaagagaggagcactgggagaaggaggaagggaggacgctcactacagggaaattaccacgaaagcaaaggcagagaagtattactagaaattaatttgtattttcttcctagttccccatatacctctggcttgacctctagcttctttttcctgatcttgctgctttgggaccagagagaagctgtagcgacagagtaacaacagttgccatcatagagtgtgtcaagccttgtattgtactaagtgcttttcatcctcaccgtgaatctataagataggtggtaaaatacccaccagtaacagaggctcagagaagctaaggaacttgcaaaaggtcacataggggttaagcagtcttgctttgctgagacaaggcagctccctatcctcccaacttcatgggggcatcttctgtagaaataacatctagacatctttattcccaagctcagcacccccaggtttagcaaggaggtgggtcttggcttggcctggcttttttaagatgttgggatttgagttcccaccagccacccttgctcctagcagtctgtaaagctgggaaaactgagactgagacctctggccccctctggtccaggggaggcatggccctttcaagctggcctggctcccggcccagtctagtggtgagggttgggatgagagtgtggaatgaagtggctcctatccagaaggctccctgttctcaaccagaggctgtctgtgcagctctggtcccctgggtttcaagcaccctcttgtgggtctgctgcagtggctggaatgtaatttgtcacttgtttgagggccaggctgacagaggccagacagggctgggtgtcggacaggaggggtgatgaagtcttgatgcaatttgcaggcatctgtagagcctgggagacagattgaaatgtcagctctgttcttgagggctgtcttccatacccatagccagtgacaggaggggacctgggggccaggcagggggaagacaaaagcagagggagctgaggacaattcctccaggaccctgggctgtctaacactgccctgcttccagcagaccatggagtcagctcaaggaggaaatacagccactttgagaggctggccctttccaggatgggaggtgggaaggattcaggttgtcttctgccaacctctagctcaacagcctcatctgccctgtctgtccccatagaagctgtcagtcaggcctccagcacgtgccctaatggcgtaacccacagacgagatggcactacagtttttgtactcatttgcaccagtacaacccggcataggcagatgagctcaaagatgactcttgtgtgcgatccccacccccagatgctggctacaggtctcctaggctctcttggtcaccatcacctgtgtgtactcggacacaggcccacttacacgcacacagccccctcaaacgtgtcatggcacgtgcacttccaccccctggcagaaaataacccaccaatccaaactctcacactatgcctaggcgccaccaccaccctattcgcatgccctcacacacccgtgctccctcacagcaaccataggataatcacaattttcccacaagaaccttcgcagttttcacatccattatctcttcagctctcataaagtctcaataagggaggcagggcaggctgttttcctgcactttatagataagggaaccttgtaatcagggaagttgagagatcctctttggtcacacagtgagtccaagacaaagccaggactcgaggccaggactcatgattcctggtccagtgtcctgtcttgtgtgcctggcaaccccaggccctccccagaactgggagaattccaagtggatgtcctccagaatcaggcagggctgactgggaaagggcatctggggcagatcctgacaggtaccggtctccgcctgggtctcccactttggatttgccttgtgccacagacaggcctatctcctgggccaagggaagaacaggggcttttgagtcttggattgaatcccggctcaatcactgaccagttgaggggccttaggcaagtcatatgacctctctgagccccagttttgcctgtgaaatggggatagtttacctacttcatgggtttgtaaggatttggttagatcctgccagtaagggttttagcacagaggggcacagcgctagcagtcatctttccatttaatggggagatgtgggccacaccctggtaaaaccttggcatttgcagcagaaatgatagccggctatgaacttactttgccctcaggtctgccagggctctgcctgggaggcattgtaccttggagccaccctctccctggcccagactctgcagctgccaggaagcaagcagcagagccaagaacctgaggtgcccctgctcagtcaggcctataagggagcttgctgaccccagagaaggagccacactcaaagggactggctaggagaagcctggtgcatcatctggttcaatctccctttatagagaggtaaactgaggcacagagaaggccaggggtttagctcagtcacagagaggtgggctgcagagccaacactgaaaccccagtcttacaagacagactctgtgcccttctgaattggcacttatccagaaaaccttatggggtaagatctgttttagggatgaggacagtggccaaaatccatggggctagacctgactgcaccctgtcatccctcttggataagcctgcctagagccaggaaatataaagttgtccagaaattccacccaactgaccccctaccccatgcccacatcaggcctggtcctgacacggcttagaagggcagggtattctggctatcaaactgtcagctggcctggcatgggcgagctgtgtgccaacagagccacctggggcacgagggcagggactgtgggcagctgtgcccaggctccagatggtacagagagcagccaagccaagatggaggctggcagtgggaaggctcttggaatgccaagtgcagagagaggcaggcgccaggcccggaaaggcctggagccctcagggggagactgactgcctggggaggggctgggacccacatgggctgtgaggctcatgcccatccatcctgaaggggcttctctggacctctcaagaaagagcctagcccaatgcctgatccccagatgaatcaggcaagcctccttggatcacagagggcctgacctggcctcctccctgtggatggctcagaccttcagcctcagagggcatcaataactgcagcaccatcaaaggaggtgggaggcaggagatgaagcaggttatgagaggctgtggtccaagccatggagaatagggcttttagggattctggtacccctgaggctggtcctccaaaaaaagggaattgagagggtcttgctgaaggccccggacttgaggcaagggctgtggtctcatgctagggtcccagcatggtgtctggctgctttgctcaggggtatgatttgtgggtccctaagacagtcctctcctccatggctcctgtcactcttcttgcccagactttgtcccacctatctgccctgagtgatcccagtgaattcatagaggggcaggtggggaattctccatgatggagggaagccacaggcagtcccttctccccaagcctgaggagccatggggagctctgtaggccttccagctgcccacccatcctgcccccagtgtccagcatggcctgacacaactgtcagcctgggcagaaggacgctgctcttgggctgagcctctggcaggagtgtgatccggaagcccttacccttaccctccgcccctacacaacaaagccacctttccaaaacagccagggcagccttcaagggccaggcctgccgcacctgctgctgcccaggccagacttggctgctggcttctcatcctacaggtctcaggccaggtgtcatcacctccaggaagccttccctgacccccaggctggtggagtgtgcccgtcctgtgcttcccatccccatccctgccagcactgggcattccgtggtcattgtttatgatttctgtcttccctactaatcatgaaggtctgtgtccccagtgcccagcgcagagcatggcacatagcaaattctcaatgtttgcttgtggaacaaatccactcaacaaaactaattagtaattaactgactgacttttggcaagtcccttttcttgcctgggcctcagtttttccaactctccagtgggtattgttgggtagtgtcagaaattcttcaggtcccaagtggcctgggtgggggtggaggttgccagaactggccctggaagaagagccttaaatcctgcttagttctggctgattctttctcttgctccttccccaaattgggtgctgaccccgctctggccaccctgtgcccgcctcccctccatgacttcagactatctcaggccgtccgggccgacagtgtccccaaggaccctgcccccatggcaccgaggtggagggtggggccagcatctgccacatttcctgacagcaatccagggctgtggcaggtcttcgtctcaaggttgcctggtaatggcttttgcattctgataaaagaaaaaaaatgtggcagcaccagacaacagacacggggcttatgtgaggggtgggcatccagcatggggcttgtgcctgggccagagagggggcaggcagagccagcatcttgctccattgtggagggtgccagggctgggctcagccttgtccagtgggcttcagtaggggtggtaggcttggggggggcagacagagcctcccaggcctgtaggggggcactcagcctggcacctgccccctcccaccccctttcccacacctgcagctggtgctttccacccagtgagccacagccggtgccacctctcattaggtgatgattttacattaattaccttaattaagcggtgctgagtgctaatggcttgaggcggggtggctgttcctaattaccctcccagtcagcccagagtgaggggcacagggcttggcagagtaggaggaaacagttgtaggaagaaggggaggggcccaacaggggtaggagagggtccccctgacagggtctgattcagatacctggacctgacatccccagaggggagggctggaggcactgccccaagataggtctagacggcttcagtccccaatccagggacatgcaggaattggaatgggcgggaagcagaacagaaggcagggagcagggagcaggacacacttctcagcgccctgccagattccctcaaccaggctgaatgcctctcttgcccactcctggtcagtctccaagattcaagtcaaatgtcatcacatcccttccttcctccatccctttgtccgatcattcagtcagcgcatggagtacccattctgggctctgcactacaaggcaccccttaaggagctcacagtctagctggggaggtggacagctgtaaacagttggatggaaggcagactgctaagagctaagatgggggatgccccaggctttggggatctgagggaattcccagagagggtgatgccagggccaagtcctaagggaaggcatcatgggatgactcttccaggcagagggaccagcatgtgcagctgggacttgggaaagaaggtttggcccattcagttagctgcaagctgtttagtgcaaagtgggggtaaagaacaagggacgaagtgtctaggggtggacccagagagactgaccttgattcaggagcccttagagaggtgtagggggcaggattgatttgagaaaaatgactgcagtggaggtggagatgggtagagtagggagcaagtgtgggcggggtgaccagtgaggcagctactgcatcatcaggggagggatggtggggtctaaaccacatgtggttgtggggatggagggagagaagcagagagatttagaggggagtatcatggtgacagaatttggggatgaattgatgggactgggggaagagggacagggaaaggctaaggagaccccatgttgcacattaagggacaccatccacattgcactatggtggttctgctccaggtttctgacctggacaggagtggctttgggggaacaaaaggaagatttgggtttgtggaggttgaggagcctgtgggacatctgtgaggacctgtagcctcaggcctcgggattaagagaaagtcttaatcctaacggagggatgagataacccagggaggctggggacaggaggctggcctgtagatttgactttcctatcagctgatcacctctctgatggtgtaatcaggtctgtcttcccccacctctgcatcccagaagccagcacagaacctgacccagaggaactgctcagagaggatttgctgaatgaatgaatgaatgagtgaagctccatgactctctcaggcccagcgaggcagccctgtgttctctgcttagcccatagattcagatgtagggtttatactcacccagtcccctgcccatccaaggctagagccccctcccacagcccctcttggcttaggccattgccaaacacacggggcagaatctaaccatttaggcccatctcccagccctggccttaggcgatgccccacaattgatgcccctaatcatccccacatcctctcatagcatgtgcctctctgaagaaagagaatacacccgccccagctttgcccttgccagatccagatcactcaccttgatttccacgccatagccagggtagacagagatgtagaagaagcagtccaggccaacatcagtgggggagctgaggtctgtaggggagtccagagagccctctgggcctgagaaattccagctacaagggcctgggaggcaggaggagacacaaagctagtgccagctctggtgaagtggtccaactaaggctgaaccgtgtgtgtgtgtgtgtgtgtgtgtgtgtgtgtgtgtgtgtgtgtggtgaagaccacctcttgtgatgtctagtctcctgttgaaggaaggggaccaccttttattaggcacctaccatgtgcaatcttttttttttttttgtatttttagtagagatggggtttcaccatgttagccaggatagtctccatctcctgacctcatgatccgcccgcctcagcctcccaaagtgctgggattacaggcgtgagccactgcacccggccccctaacatgtgcaatcttatctcagttttcacagtagctcaatgaggtttgttttctttctttttttttttttttttgagacggagttttactcttgttgctcaggctgaagtgcaatggcgtgatctcagctcactgcaacctctgcctcctgggttcaagctattctcctgctcagcttcccgagtagctaggattacaggtgtacaccaccatgcctggctatttttttttttttttgagacagagtctcgctctgtcacccaggctggcgtgcagtgacatgatcttggctcactgcaagctctgactcccgggttcacgccattctcctgcctcagcctcctgagtagctgggactacgggcaccccccactacgcccggctaattttttgtattttttagtagagatggggtttcaccgtgttagcaagggtggtctcgatctcctgacctcgttccacacgcctcagcctcccaaagtgctgggattacaggcatgagccaccgcgcccggccaattttttgtatttttagtagagacggggtttcaccatgttggccagactaatcttgaacttctgatgtcaggtgatccacctgcctcggcctcccaaagtgctgggattacaggcatgagccaccgtgtccagccagaagtttattttcttattgccattttacagatgaggctcagagatgagatgttaaatagaattcctagggtcatgttatagttggaagaatcaagattttttcttttttgagacagagtctcgctctgttgcccaggctggagtgcaatggtgcaatctcagctcactgcaacctctgcctcccaggtttgagtgattctcctgcctcagcctcccgagtagctgggattacaggtgcccaccaccatgcccggctcatttttgtatttttagtagagatggtgtttcgccatgttggccaggagggtcttgaactcctgacctcagatgatccactggcctctgcctcccaaagtgctgggattacaggcatgagccactgtacttggctgaagaatcaggatttgagctcaggtctatctgggtccaatctacatgcctcctgcaggctggcccttggtgccaaagggcagggcaggctggcacagtgtcagagacaggcttttaggggccccgcagcctcccccatccccatttccacatctgcaagccagcaggtagctgacctggtgtctggactgtggtgatggtggtggtgatgatggtggtggtagtggtggtctcctcatcatctcctgaagctgtggaggaggtgatggtcccctggatcccgatccctgcgccctgggacacaacctctgcaacccacggccttcccatgtctccaggaccctcttgggttggtgtccaggctctgctggggggtgtagtgctggctatctcccctgggcctagggtgggcactgccatgctgggccctggaggtaggggagctgtgattcgaagcataggggactctgactccggactccagggtccctccttggactggggctgagtgggtaccgcagccatggctggagtggggctggtaaagacagggcggctgtcctggttggccaggcggggaaggggacttggggtgaagggtgcaggtgggtcaggctggaagggcagtgctggcctcagctcctcatctcccttttccagcccctcttgtaggaattcctcaagcagcgggtggtggttgagcagcttcaaggtgggggctgttgtgacaaagtggacgcctcgttctggctgctcaggtgtgggggctgctgtcagctcgccatctgtctcctcgatgcctggggcttgtcctttccccacggttggggcctctaaagagagtcctgaaataataagggatggtcagaggttctccccctgctccagagagcagcatcacgcccaactcgagtagtgggggggcccgctctcttttgacagacagccctgaggagcgtgctcactgctgagaatcacggaactacagaatttgtgaactggaagtgaggtgctattacatacttcaagggtggcacatgagatactctttctcctccagcaccagaggcaggcatttctagcccatccgtgcactatttcctactgttctcaggttcagcctcagaatcctcctcaacacagcactccacgaggtcacacctgacacctcagactgacatgacaaatatttgccatccctaatgaagagcagaggccttattttactagtgaggaaataggccagagaaaggaagtgacttgctcaaagtcacgcgaccagttgaattgagatgaaaaccgtaagtgtgtctcccaccacagtgtctttcctgtctgagatgatagggcattcaagttcatttcctgttctcagtgaacctgctggtcattagcctcaggaaatgcgtcacatatttgggattttattttagatttcctcatggttgcatgacttctttttttgtttgttggttttgagacagtgtctcgctgtgtggcccgggctgcaatgcagtggtgtgatcatggctccactgcagcctcaacctcccaggttcaagcgatcctcccacctcagccacagtccccacacccccacttctagtagctgggactacaggtgcatgccaccatgcctggctaatttttagaatttttgtagagatggagatctcactatgttgtctgggctggtctcaaactcctgggctcaagcaatcctctcacctcagcctcctagggattacagcatgagccaccgcacccgaccatgggtgcatgacttctttgttaggggcccagtagtttctctccgttctcaggaaatcatttcttttgtactcatttctgtttttatggtccttctagagcagtaatatgagtagagtgggaagagccaagttctggagctaggcagacataacttcaaatcccagatccactactctagggctgtgtgccctcaggcaaataacccaaactctctgaagctcagttttctcatctgtaaaattgggtttcctttttaggattgactgagataatattacatcccgtctctatttgatatgtccccctgagttcccttaatctttctggtgacactaatcaggttccatctagggcagggtgaaaaacaggtgtagaatggaaatctagcatgctacccacccactccctaatccatggcaggcattgctaatcaattttggttatttcttgctaaggccacctggtccttagcaacttccctctcacaatgttattcaggcagccactaccaatcaatgagattggctctgggggatgaaactgatttgctatctctggtctgaggtacagattgctctgctattgattgtgttgacttattcaaccacatagctggagagatgatgcatattctgcttgtggcccattcggctccccagatccttaactgccaagaaaaggtcaatgaatgctggctccagattcagctcatacagaattttgccagctctgagaagcctgggaggatatttctgatccttacagctctcaaaatggctgcatgaggacttgaagggaaacacagccggggtgagatcacagagtttgcaaggagaaggtcgcttcctccgcacgtctggtggtggggctgtcattccagaggctcacacccactccatagattggcaggcatgaggaagcagcagatggcctacgttctgttcaggagaccatagcagctctgatgtgtcagacaaatgggaggagggaggaaattgggtgggggaggtgggtacaggttggagggctctccattcttctgggtcagaggagcttgggcaccccacatccctgagaaaccaggaccaactgctatctcctgagatgcccactaaagcagcccatctgtgtcttggcattgtgtgccagccactgacaacaccatccaatctagatgtccagccaggcccacaccccccagagcagatggtccaccagtgcctgtctttcatctgaataagttacggaaggtccaggcagtgcctgtgacatgccagaacagggctcctctttttgcccaccccccagacatcacacaggctatgccaggtaagctgagactgattctagcatggcgcaaggaaggggggcttttctaatcacatagattggagccccctggatccgggcattgtttatgcggcccctttccagagtacccaacaagagatgtggcccttggctctcagagtaggtacctgtgtgactcttcctgggagagggagtgcacagagattctctaattcaggaagtgtccagggcaggcacagctcttcccgctggctgccaggtgggtgctgagcaatggagcagcactaatgggcacctcccatcactgtcgattgcactgattgtgctatctgggatcgagatagcatatcaaacgagcaagttgattccaaaatcagctgccacttggtcccagcgggtgccacccactgtcatagagggtaagataacctctgggagacaagccatttctggggagagggcatctccagaccccctggttgactctgttggaggcctgaggccctgagacctgccccctagtttcccaggattgtggccagtggataggggcttctctctgcctgggctgactgaattcaggggtgcagggactgacgaagggagagtatgatataggggacagcagaagaaggtgtcaggggctctaatgcccagtctcatcaggcactactgtgtcaggcccttcccagaccttgtatcatttaatggatgctgcgcctctgggagatgggaattttatttccattttacaaagacctgaagcctagagagctgaggcaaggactcgcctgaagtctcgcagtgacgcagctgggatttaaaccttcgatgatttggcttcaaagccctaggtctttccacatacccacctgcctcatgggaggggcagactggagctacacagcagacaacactccagccagttgaagaaactaagtccagggagaggcacggactcgtcgaagatctcacgccatttagaagtctggggccagagcttctggcattgggacttgggttgggccctggtcgagcaggccctcaggaagccttctggctgggacccagggaagcccccaccctgtgcctgaagcacatctgagcctcaaacccaaaccggagacccaacaacactgctgtgtggggccagggcacagagccacacagacctgggttcaagtgtcagttctgccacttaaaagtcatgtgaacctggcaagttgcctctcagagcctttgcctcctcagctataaaatgggcactttggaagggttttgtgtgaatctgcatgctctgaataggagagttctgaaggctgagggagaaggccacagtcagaggttaggcagcccctgtcaggggaacactgaggcaggcttctagggtaggaaggggtggcccctggcaggtagggctctctcttctctgggggactacccatgttccatgttgggtggcagcatgtgtgaccctgaggatgtcaaatacctcatccataaaacaaggataatactgcaccatgcaaagggcgaccaccttcaaggccctgcatgtcggtgggggacacagcggtgggccgcagcaagatcgtccccgtgatccccacttgccaggcccacctggtgccagaacacaggatgcactccgcagttgctcagtcctcccctcccgcagggccgggggctgcattctccgagtgggctgggtccgggaaacacccctcccttccccgcgggccatccctggtggagactgcccaggaacttcccagcgcctgccgcccccagccctggcatggccccgccgccgcctgggccctccccccgcattagctcttaagctgtgcaaatagacatcggagggagccctgtttaaagtatttagacgaaatgaaaaaaggctttcatcggcactaatgagccattcaggatgcctccccggtggattctctcccgctcccgcctccctgcccgcgccgccccgctatggcccctcttgggattggaggccccttcctcccaaccccagcctgggactccctgggaggaccgcttaccccgcctcacttcccagggcccagctgggtgagggtggagcggaggccacctgcgccccagccccaccagatctggatcgggatggggggcggggcccagcctgtgtttaggggaagccttaaggactggggcgtgttctagcgtccagctaggtaggtgttatggcctctgtcttatagatggggaaaccgaggctcagtgaggcccaggagcttgcccaggttcacagtggtggtgtgcggtggagctggagtcattacgcagtgccccagcctgggggaaccgccgaaccaggcagtggtgccacctcagggccagctggcttgccccttcagcgctgctgtttctgcagatctttctgtaccagtcagccagaaagccttgggttccaatcccaaatcgatgtgacactagctgtgtgacctgggcgggggctgcccactcaagcctctgtctgctcatctgtggagtgaagacatactgggtttggggagagctcatctatggacagacatatactgtcacccaccgcagcctctggaagggcaggtggcactgtctgtcactctggcagcccctgaagaggtgccaggcatttcccaagcctctggcccctctgaggtgggcagtcacgggaaccaaagttctgggacgagttcaggcctgatccccgcctcatggcagcaccaactgtcagcttcgggggagggcatgacagcgtgtgggtacaagggggagcctgagggacagggcgggcagggggcccactcctctgggttccagaggttaagctggcccagcacggggacaatgagaatttaatgggatccatttattatcccataaaagttaatgagtttattctgaaggttccctggcccctttcaagttttaataggggattagtgagggcctggtccctgcagacccctattatccgagaacctgagggagctgagagtgcttgggccccccagagccagagtccctccttacagtgacaattccacgggcccagccctgccctctgtactgtgaggccccagctagaggctggcagggctatatagggccgctgggatctgaggcctagttctagaggcttccaattccatgcgcaactgaaataattaccccgacagtgtccagcacctgaggcaggtttgctgctatccatctgcttgtattgacagggaaagcaatataacccccatgagacagataaggaaagcaaggccctgagcagggatgtggctcctccaaggtcacccagaagctatggctgagccagaatggacacattctgtctcctgtggttggtagccaggaaactggggctggtaagagctgccattcacttactcggtgcccactgtgtgctgaccatgcactcagtgccctcatacgtaatttctcattctccccttgctccagggaggtttgggacattatcccaagagatgaagacactgaagcccagaatggttatgtaacttgtccaaggtcacgcagctaatgatggcagagcctcggactggaacccaaagctggacagccccatagctcagctgtctactgctcttgctggctttcggctgtagcacctggggcctcctatctccccaccaagctggacaccactatcctagcgcactcgtgccaggagccctgcagcttggatgatggggaagggtgttctggttgtgccctggaggggcagttgttgggttggacacagagatacactcaaaaggaacttctcatcgtcagaacaggtgccttccccgttttggccccaattgctcacgcgattctctctccttgccatggcttctctactcctttgtctctgcaaaacctccccatccttcacgggtcagttcctagcctcctctggagatccatccttgcctggcccttctcttgacctcctgggggcacttcctagtgggctcctaacacatgaatggcttgtgtccctgggcaaggatccagcagtgggtatctctcttcccatttctctacctggtgctaggcatagtgaaggctgggctcagggcacactgtttccaagccccgattctgcctctctgcacactcagaaggcaacctgctccccaaagtgcctagcccttggccagcaaggtgagcaggagtgggtcctgccaggagaagatgggcagccagcccttggccatgccccatcacagccccaactggcagttgatggggagtgtctgctggcacaagctgatgggtccccattgccccggactaccctctcttcccctgccactgatcatccccatcacagcctctcaccaccctctctttcttggtcaacccctgcagtccagtcaaatttggattgcaaatatgaatgggggcacctcctcttggccaggctccaagtggggcagtggctggttcccagaacatgagcccttgtagcatctcatccctccctcacttacccaagaggaaaccaagtccagggggttttcccaagtcacacagcaaacttggggcagggttgggactcaggatggggctgggacatctagcccaactactgggaagagtgaaccctccagtctggagctgtcttttatctgtgggcatacctccagggacagagaccccactgcctccttagccatcctggttggggacaggggtaactgtgggctttggcatctccagagttggggtctcactgtcacatggagggagcatgggtggaggtagtgggcaccagctaggagtcaggccatgctatcctcatcccacccctgacaagccaggtccctcagcacaaatcacttccacaacctgagtttccatatttttgtcagtaaaatgggtccctgccagttctcacattccaggatctagtgaaccatgaagggctctatgaataaaaatattgaatgctgctgtttactgagtatacatttaccacatgcccagcaacactctaagtgctttatcagaattaatccctataataactttatgagatgggaacttttattatcccattttgtagatgaggacactgagacccagggaaatgcattagcagtttggatgctaatgcagtctgattcaaacctgggttgtctagcctagagcagccctgtccaatagacctttgtgatgatggaaatatttttatttatttatcttatttttagagatgagggtcaagaccctatgttgcccagactgggcttgaaaccacctttgccaaaattataatggtgagaaaattatgacagtgaaatagatgtgatgtaaccaactccatcttacctttaacctccagactgcccttggtcattcctgggtatgggccaagctaactttgggagaaatttagtttatagtttaaatgataatagcccttcccaaaactaagccaccttttaaaaactaatgaaagaggccaggtgcggtggctcacacctgtaatcccagcactttgagaagccgaggtggggggatcacctgaggtcaggagttcgagaccagcctggtgaaacaacatggtgaaaccccatttctactaaaaatacaaaagttagctgggcgtggtggtgcacacctgtaatcccagctactcaggaagctaaggcaggagaatcacttgaatctgggaggcggaggttgcagtgagctgagatagcaccattgcactccatcctgggcgacaagagttaaactctgtcccctgcccacacacacacaaaaaaaagaatgaaagaccaccaggtttggaggctgagaggggcctgaattctgctgagatgtaggcatagttagcagccgttattctggaagtcacaagatttgcaactttcccaattactcctgtaaataacatcactatagtagaacctatgattggctttttgagatgtcttttcggacttttgcatttctttttttctttactctgtcacccagactggagtgcagtggcatggtcttggcttgctgcagccttgacctcccaggctcaggtgattctcccacctcagcctcctaagtagctgggattacaagcatgtgccaccacacccagacagttttttgtatttttagtagagatggggtttcaccatgttgcccaggctggtctagaactcctgaactcaagcaatctgcccacctcagcctcccaaagtgctgggattacaggtgtgagccactgtgcctggcaagacttttgcatttctgttgacaagatggctccacctggctcaagactcatgactcccgggtcctgcggcccccacccagaagtggactcagtgtaggaggaccattttccagacccctatgatttcatccccaaccaatcagcagcacccattccccatctcccggctataaaaaaaccctagcctccttcaggcttgaaagaagactcccgaataatagtaataataatataataataataaaagtaaaaaaccaaaaaaacaccaaaaccctagcctccaaatattcagggaggctgatttgagtagtaataaaactctggtctctcatttatttatttattaaaaaaaattttttttgagacagtctcactctgtcactcaggctggagtgcagtggcatgatctcgtctcactgcaacctctgcctcctgggttcaagcaattttcctgtctcagcctcccaagtagctgggactacaggcatgtgccaccatggccagctaatttttgtattttagtagggatgaggtttcgctgtgttggccaggctgatctcaaactcctgacctcaggtgatctacccgccttggcctcccaaaatgctgggattacaggcgtgagccaccactcccagcctccatttatttatttattgagacggaatctcgctctgtcaccgaggctggagtgcagtggcacgatcttggctcactgcaacctccgcctcctgggttcaagcgattctcctgcctcagcctcctgagtagctgggattgcaggcgcccgccactacgcctggctaatttttggtatttttagtagagacagggtttcaccatgttggccaggctggtctcgaactcctgacctcaggtgatcggcctgcctcggcctcccaaagtgctgggattacaggtatgagtcacagcgcccggccagtttacatttaaatagccacatgtggtcagtggctaccataatggaaagtgcatatccctacctgacttctcagccttacagtagtcacacctctcagtgaggaagagcccagggtggggctcctggaaaagagttaagatggggtgtctgctcccctcctttcgggtctgggaaaactgcggcttgggattggcagggagagatgacaaggagccctggacttcttcgagtttttcagaaaggcctcggggaactgggcgtagcagctactcattcctcagggaggattcttgtcatccaccgatgaggtttgcttcccaaacttggccgcgcacaggtgctctgagggttggatgtatgatgggcaattctggaagctcagagccagtttaggaggattttatgggtggaggacagccaggaacacttagcttcgtactttgccctcacatgtgtgttccaggggaacgtttgctgcgctctgttggcttgcccctgcctcactgcccagccagcagcaccgagggcagagtatctggcctggctactaccccagagcagctgcctggcctcgggcacaggagaggcactcacatttactgagcacctgctatgggctagccatgcacttcacaaagagctgtcttccacctagagtggcagccctttgtgcttggaatcaatagtttatgcttggcctatgaagaaactaaggctgagaggcaaagtgaatcctcctagttcacacagaggaaagtgacaaatagagtttgaaccgagtctgcctgttccatagcctgggatgaaaatgtctactgccttggctgctgcttcgtgtgagcatgtgtgcacgtgcgtgtgtgtgtgggcgtacgtgtgtgcatgagaccgggtgtgtgtgtgtgtgttcaagtgcatgtgcatgtgcaggtccaaatacatgcctgtgccacaagtcactaccatgtgtccctgcccaaggatgccacaccctgggacctggcttcaagcagtccccaagcccagaaaggccctaccccccaaaagaagggatatatttctctccaagctggctgttgtgcccctttttcactctgccctctccttggggcctgacctgacccgccccagggccatctgtcctggacagcgtctcaggctctgggtgggtgggggagggagagactagttggggctgcggctgggccagtcctctctcctccagtgtcccctccctcccatgaggctgtgaccaggggcccagggtagagagctcccagctaactgccacgttctctgcttttcaatttacagtctaatatggtctcgccactgcagagctgggggctggagaggtgatgaatgaggcctctgctcctgcgtcacctgctgcactctacaccgtcccctgcagacctgtgttcccttctcctgtttgcctgctggccctggggaccccagccctgcctgcccacagttcctcagactgggcaggtggcactggagctgggggcctggagtgggggttaggtgagagggagggactgaccttgaggtaggggcaggaatcgaccccagcctctggggtaggatggaaggaatggtcttcttggcatcacccctcaccagtctgataaataatcaatctgctgtacctcaccctgcttatgccacctcccaggagtgtggccagggcagagtcctaggtagggctggagctggggactgggcttcgttctctccctggaggcgtttctgtccatcagctccttctgtccatctgctagccccaggccccttctcctacctgctatgttaggaggcagagaatgaggagctacccactggccccaaggtgggggtgtggagcaagtgggcagaagtatgtggccctgagctgggtgcgtgactcacagccctctccctgtgccagccacttctaccaccaccatatcagcagcagagaccatatttctctgaatggaaaatcttggaggtgtcagctgggacaaggaaggatgtggaggcaggagctgcattctccctagagccagtaccagggtcagctctgcccagtgcagtggtgaagttgggggacaggggttgatctagggaggaatagcatcccctccatcctttgccctactgcctcgctccacatacccaacaaagacagtccttcctagccatggagcccagcaagacagggccatgaggtgccagggccggagagtaggttccttcctgggccccaggccagcatctttggactactgccccctcccagcctctaccctgaggttcaaaaggccacaccactgaggctgttccagcacacgtgtccacttttgagctgaatcaccggcctggcagccccaagcctctgtggcctttgggttagatgaaggggcttgttttgtgcaccaggaccaaagttacctccctgactttgtgacctttgccctgtggttacttttgtctgctgcatctgggaggagatgaagttggagagcttgactgtagatggaggggccctaagcccagacccctgggctaccctgatgctgaggtgagctctggccactccctaccctgaaagtccctagcatgtctgttcttaggtgtggaagctgaggagcctggtgaggccttattagaaggcctcgagcatggatggagctctgccactgacaggctatgcgaccttgggtttgcccggcctctctgggcctggccggtttttcacacagtatttggttactgactttttttttttttcctttttggagacggagtctcactctgtcacccaggctggagtacagtggcataatcttggctcactgcaacctctgccgcccaggttcaagcgattctcttgcctcagcctcccgagtaggtgggagtacaggcgcctgccatagtgcccggctaatttttgtatttttattagagacagggtttcaccgtgttagccaggatggtcttgatctcttgacctcatgatccgcccgcctcagcctcccaaagtgctgggactacaggcgcccgccactgagcctggctaattttttgtattttttagtagagacggggtttcaccgtgttagccaggatggtctcgatctcctgaccttgtgatccacctgcctcggcctcccaaagtgctgggattacaggcgtaagccaccgcgtccggcccggttactgactttttagagagtcttttgggtgggtgggacatagtcactgaccctttattatcggtgctcaaccctgggggctgatggagcctccggatgggcaggggtagaggaggagggggcttggcatggtgggggactgtgctctgttgacttgccacttttcttttcttttttttttgagacagagtctcactctgtcgcctaggctggagtgcagtggtgcgatcttgactcatgcaagctccacctccagggttcactccgttctcctgcctcagcctcccgagtagctaggactacaggcacccaccaccatgcctggctaattttttgtattttgtagtacagacggggtttcaccgtgttagccaggatggtctcgatctcctgacctcgtgacccacccgccttggcctcccaaagtgcttggattacaggcgtgagccaccgcgcccggccgacttgtcacttttcttttgagtgtgctggagcctgtcacctcatctccctctgctgagcatctgcagggctaggctgtgtgtatgtgtttgtgtgtctgtgtgtgtgcacatgtgtatgtatgtaggtgtgtgagcatatttgtttgtgtgtctctgtgtgtgtgcatgtatgtgggggggggtgcattaggtgaggaataggagtcagggatggaggtgtgagaagagggcctggagagagcgctaaggtttctgggcagctgctgtgtgctagactccatgctgccccatcatctacaccatctgattaatcgtctccatcccgcaggtggagaaacagggtctgagagctgacgtgacctgtgggaggtggtctagctgggcctgggaggcagaccctgggcatccttgtcctgctgagctcaagagacagacagaaggacagatgcaggaacaaaagactttgaaagcaaagatggcctgcgaccagaggactccctccttggtctctcagttcagaccccttgaactgccctaccataccttctcccagctggtgccagtttccagagcagctgcagctggtggtggtgggacccagggtgaaggctcaagggtgtggaaggcaatgagctctaatggtggccttttggcagagttgagctgtagtaggggcctgaagccctgctggggagtgcaaggacagtactggaggtccctgggtgggccacctcctccaggcatgcctccctcctctccacatcctgacactttgagctcctttctgcctctcccagcctctgtgtgggagacacagaagctccagccttatttcctttttttttttggagatggagtctctgttgctcaggctggagtgcagtggcgagatctcggctcactgcaagctccgcctcccgggttcacgccattctcctgcctcagcctcccgggtggctgggactacagcgggtgcctgtagtcccagccaccacacccagctaattagctccagccttatttccaaatggcttagggaggagtcactggaggcctgggctctgcccttagggacttggcgaggttgtagaggcagagggaggtcatcgtgggacctctcccatcggcaggcaggaggaatgagcttctcctgccccagggtgtgggccctgagcctgtgggctatcccaggcaccttttgcctgaggggaaggggccccgcccacccagcactccagcccatgaggctggcctggcccttcacttccccagcaaacctgagtgggggaggggaggggtgcagagctgctaaaaatagctgcagaagctccagctatgagtctccttgaggggtcagtgaagcccaagattggggaggaagagactggagtgggctgcagggagggagagagaccagcctgggctggggcctggtgtaccttacacccaggccacagtcctaggatgcagggacagagggcacagacatgcagggacatgtgaacacagacactcaaggacaggtgaacgagccaggcagaaatgcacgtagacatggctaccagcacaactggggcttcctctccccagaacctcaggaacaccagatgggcccaactgcacagcccccagcctctcaggcctgtcccttgtctccaccttgttttgacctccaaggaccctgcagagctgggtgtgtggacaccttgagttgacagggctaagccctcctcccttgtctctttcagtctcctgtgtgtgcagcttagggtagggaaggaccaagggtcaccggaggcagcatcagggatagagttacagcacagaccagagttagggcaccaacaagtggctgtcggctcaggagcatcactcgacctgagcaacaggctctttctatcctggctggcaggcagagggaggcatgggagagaagtgattggacccagtagggcaggactggggctctgccaggagatgcgtgggaattgagggaagggggccaaggggatctagagaagtaaatgcatggatgaccactctcgtgcatgcgttgtttgatcccacattcacacctttgcccggagatgccccctttgccaggggctctttggtccacaaaagttgactccatgtcttacctttcctctaaccagccagaaaatagggcttcatgacaagagggggcctgccagctgctggaccagacatttcaaatcaccagcatatctctttgctagacgtaaatgatgcctaagacaatgtccatcagagcagcaagccagggtgaaggccttagaagcaccctgatcttggtccctctgcattgctagtctcaccttcttggacagacccaaaccagctggcgctcacccccactgctgcctcagcggtccagctctggactcctgggttgtatgattcagcccctccagagatgcctgacaaatcagcctctcctggtgatggacagttctggctgttggaggggctcctctcaaggggtcttgtggtttcttcccagtcaccatcccccccaccccgatttcctttgatcttcatgctgttctacaaaagaggtggggcagggacaggcatcatgaattctcaaggaaactgaggcttggggtgtgacacaacttgcccaaggtcacacagccagcaaaacccatcactgggtgtcctgactccctgaccagccttcttcctcttatgttcttcctttaggactcccccctcctccttgagcacaacttggctccccacactgcctgatgcctccctgcccccacccccaggctctgggactccttaggcacctgctggctggtgggacccaggccagacactcagcaggtggctgcctgggggacaaaggagttggcactcagctgctgagctgggagggagggagggaaggagagaggaagggagggaaggagaagctatggggagggaggagggatggggctggaagttgaggggagaagggtccgctttggtgtctttaacaaggagccatgagcaaaaaggggtaaaccagcatgcacatgagcatggggggcgctcagtggtttaggcacttttcacagtaaccccaagttctgtcctcccagactcatgaccagttagagggaggggcttgagggtagagagaagagcctgttgagaggggggatggagagactgagagagatgccaaggttgatgccacagtatcaaggttctggctgggccctggggacccaggggtagggagggatggcatgagaaggagggcattgtgaggagagattctgcagcacatgcgatttggtgctgcagaatccaagcagcgggtctcccccttctttccccaccacaaattcatgatgcctgtcctttttccagctctttaatggaacagcatcaggatcaaaggaaatcagtggggtggtgactgggaagaaaccagaagtcccccctaccccttgagaggagggtcctccaatagccagagctgtccagtggcaggagaggtcctgtacctgctcttcaggggcacacctgacctgccagagataggaagggttgtgatgaagggcacccatcatggattggcccagggaccccagaggcttgctgggtcgtcacagacccagaggcaaactcttttcctacaaatgagaaactgaggccttgagcggtccctggccaggagtctcctgtccttctggaggccagagtagctggatcatataggtgctgtttgtcatttcatctgtatctctttctattaaaatctaactggagagatagtcacaactgagcttattaaaaaggcagctctcctctaaactgagttccttaaggggagggactatgttatattcctcccaatcaaagcacctggtagctgttgaatagagggttgctgaatggagaatggaaggatggatggatggaggatggacaggctaagttctattggtgtttgggaaacagagagagccatctgggctgggtgatcaggaaaagaggggatgggagaaatgaaataagcagaaggacccaggatggccttccaggtatgaaaaaatggctgagcaaaactgtaggggatgagtgacacagggcatgctcagggtctaggattcaccctagcatcctcatggcatctttccactgccccccttcattcagtccctgctcatctcctggcagagccccttgttccagatggacccagccaggacttcccaccctaccccctcccttcctgccagactgcctgccagcaaggctgcaggctctgcagcctgagacctggagacccggattgttgttggagaatcggcaggtttgtggattgttgttggagaagccgcaggtttgtttgctccggagcccgcagagaaatcccaacaatcaatggccaacaacactctgcctgtggctgcagcatccatcctccccccacaggtctggtggtttgggcagcaggtaggcaggtggaaggaagctggggcagggttgggccttcccacctgggggctgggcctcagtggaggctgaaggggagaggtagggaagcccaggatgccaggacaggagtgactggtcctctcattcacaaagccctcaaaggactgaagagtaagagccaccccacatcactctgctctggcccaagacttcagggaccatagttcacctgactcccagccccttattctttcctgacctccaaatattggaaaggatgttttattcctttgccactaatgactgagaagcacctatcatcaccagaaatgtgctagaagaaagtgaagggctgtttatgtcttgggtctgtctgacaacatgggtttcaacttgattaataaaaggcagataataacttctatctcacagagatgataagagaactaaatgagctaatgtatacaaagcacttcgtacagcgcctggcacatagttggtaccatataaatgtttgctattattgttgttgctattatttggatagtgatactctcctgggttcccttctgcctgtagtgaagctctcccctatgccgggaaagtggacatagtgctagctgaagccaggttttgtgaaatgggcagacactttggagtagccttactacttactggctgtacagcctcagggtaagtgacttaatctcatcaaaactcagtttttccatgtgtaaaatgggaacaactaatatcttactgcgagtactaaatagaaaagtcatgtgaaacgcttgaccagtgaaggctgggcccctgaggattctgggccaggcctcacgtctcaatatatatctatggaatgaatgaatgaatgatggatggatgggtagatataccccagggcctgctcttttaggagttgtggacctgaattattgtggttctggatgattcttaggcctccacctctccattaaagggcatgtaggctcagagctgctcccaaagattcatgttggtccctgcaagctatgtgagagtgtctgaagctgggagatggatgagggggctatggagccagatgacatggattcatccttcccttacctcttagtgccagccaagtccattcgaggcatccctctcagccattaggggtagtgggtgggtgcttagggtggctgttatagggggggtggtcaggaatcctgggctttacctctgccaatacccacctgtgcaactctcattaatttattcaacatgtatttaatgtctgccatgtgctaggctttgtgtcactggggacacaagcagtggtggcactaaggggtgactggggagaggctttagcccattcagaatggccatcagcaccctatccctgagccacctcaggctgatggcgtgacagcttaatttgtagaaggaaaaaacgaagtaaaggctgtaatttacagttgggataattggccaactgttaggaaaggaaaaaaattctaacatacaatctatgtaaaaatagcatgcttgctacgcaaactcagcttcaagattcggtcccagctgccataggcccgcctcccctttctaaccaagcagctgaccctaaacttctcccaaacaggaattctagagcttccccaagacatagtgggtgaacaaaacagacttgggatcatctttgttgagtttagttttgctgctggagcatcaagcaaccagggacttgtgacctagcaagatggggacctggatgggggaagccaagggatggtgagagcacagaagagtcctctgacccaggctggaggacaggcctggctcccctgaggaaccatgtagtagatgctccttaaataggtactggagaattacaggaagtgtcagctaagctaatacttgaagcgtgaggtagagtgagccagattggtccgggaggggaaaggaatttcaggcagaaaggctgataagagcccaaaagctgttgagaacttggttcatttgacttggctaatttggaaaactgaagctaaaactcctttggcctggctgggtgggtcggcttcctggaattgccacttcctgttggaattggtcttggagacctcctagtgcctgcttcccaccacccagctgcagaccagtgctggcagcatagtctccgccagaaacctcttctgtatagaacctggctcctcctccctgagaataggccagtaagctggggacccagaaatctgcatgacttgacaagaactttgaggctctcctgtgctataaggcatggcaacttccattgaaggctccagagagtggaggcccagagaggacaggggtatatgtgagatcacatgggagcctgggttcttaaccacctggattgagaagttccttcactaatgtaactcctgcctaataggcccttttctgcaccctctttcttctttttttttttttttggtgggggtaggggtggggttggtagagtgctgagccatgacagctctgcccaggtgggggcacagcattcctgagctgatcccagcccagcagatggggcttaattgggctaggataggtggggacaaggagcacaggaagctggagggcctggaactggatggatggaggggctaaggaagcaggctttctgatatgctccccatatttaggcaggcatggtagtactggtggggaatggaagctcagtttctaattaagcccagcccttgtgtctccttgctctccattagtgccccacagtgtccccaaggcattttaagcggccaccctgctgaggaggccaggatggccgccagggcctgccaagcttagacctatgaggagcaaaaagccaactcaggcttctcctgtccatggcagtctctgggtcctccagcctccttggaagcccggggctggtgggtgggggtgtgctcctgcctgccatgtcaacctctgggtttctgaacagaatctggactgtctcccatggggccttgtccccagtaccacttcctgatcccgaagtgccaggctggggacaaggaacaggacctagtattggtttcagcagcagcccccagactcatggatgtgctgttagaatccagcacctaccaaggagtctgcaggaagcagcaattaccattttaggttaaggcagccctcgtttgttaacccttgcagcactagggctcctggaagctgagtcgtccttcctctcttttctcctccagaccttcccttccagacatcatccctcagttcttggcagagtgagtaacccagactagccatccccaggccccctctatcaccacattctcaagtggagctcagagaggtggagcagcaggtccaaggtcacacagccatggaggcagcctccattcctgagacccaaccttaccccagtctcagcggcttccaccttcataatctccctaggccacattcacacatgcagagtttaattaactttattgatattcagaaattaggagaatgactaaaggtaattgctcattaaaaatcattaaactgacacagcaggctcggcacacgcagccccttcaacaccgctttttcctccactgtggctggatggcccaggcaccccacacagcttgggaagataccccgtggcccaagacgcccctgatgcctgacgccaatcaagacttggaggctgcagaagggaataggggactgagcctgtgagcttgggccaagcccagcacgattttgccctacctccgcagcctcggcataccaggccttccaaggcatctgggccgtgcctggctacatcctgcagtctgcatcctgcctatgagcaaagctctgagggcctcatcagagaggtggcggggctgaaaggctgagggatgcacccctcgggccgaaaaggctcatagcctgaggtctttgctcctttaggctcgccttcacaaagctaaagtgcccaggaaccccgggatggccaaatgcgctgctccccactgagatgactcactatcccaatggttgggacctccagtccagccgaggagagaggagcctctggctacccagctctgacatcccagccctctcatcctcaggcttggcacttcggggctgcctcttcgtctcccttggggagtgaaaatagaggtctttcccaacagccagactcctaccccacatatcccactggcaggtgcctccatgggcactggagatcctgatagtcaggaagggacactgcccagggacacacagacttgaggccacagagtgagcagattcctcctaacactcacacccacatccccatcagggctggtgggactcctggccacaccagccttcctcctggattcccacagtctcactctagccctgcagggagctctctggctgaggctgcacccacacactagtggcctcacacagtcctcacacccattcactgctgacccctcacccaagattcggaccacttgaagtgcagacacactgggactggctcctctagtcatgcagggccctgattactctcacattcagacccacaaactcacacacaaggccttgactaactgccaggggacagacacaggccctgcgccccaggggagctgtccagcgccaggacccatcaggacccaagataggttcggaattcctagggacatccccaggcagctaggcagggattcacacttctccttcccggtcttcatccctggggtgggtcttgcaggactcttcccctctccccagaacgtgagcacacggtttcaagttctgggcgctgccggaggatccagcatgggcagcccggtagcggggtgaggacactgggctgtgtgcaagtggagctagaggctcagaaaaaggcttctgcgtctccggggccacagtttttcttcctggatgaagaaaactgccgtccgggggcccagcctgtccctggccgcgctgccttgacctcggcagcggcctggaaagatcgagcagggaggttagaaactcccaccctcacacttcacatcaggcccttcaaaccatatggcaagggatggcaggtctcaactccaagtgcggttctgccgaccctaccagcctactgcagcgggagaaggacgtgggtgccagtagcttccatgagagcttgtttgagccaggacggcaggtccagacaagactcttccccgaggcacggaacccctatcctctccccaacactcccttgccgctcacaccatggccaagcttccctctacccaagaccgacgaagttggggaccagactcctagagggggcgcggggattctcagggtgtggggaacaggtcctccagagacaaatctgccttgcaggtggggagtggaccagggccgggcaggaaggcaggccgggagggaggcagagctcggggcagtggtgtgtgtgtgtgtgtgtgtgtgtgtgtgtgtgtgtgtgtacaaggaaaggactttggggaggacagagtctctatcccaggatctccgctgctgcagccgagggcagagccaggagccagatagggggtccaggcccttggagtttctctctagaattgtgctctaggtcccgactctggcgtggcagcgccagggcatggggaggtgagcgaggtcccaaccccgggtccggccgccatccggccccgtctcccctcagtaagaacactagaggccctggaaccggcggcaaagtcgagcgaagtttggcgggcggcaggggaagcgggaccacgggccgccagctggaccgtcccgactcactgccttgcgccccccggcacgcgccccagcaccctgagatgcctagagtgtggcgaggtagcgcgcgggtgagcgcgtgtgtgcggggagtgggtggcgtgatgaattgcatcagagaaatcccattagatctggggagatgattaaagacgaggtctcggccgggcgcgaatggcgggagccgcggcagcttcccgcccgcgaagcccgcgccccgcccggcttggccggcgccgggggcagcgcagccggcggggcgcggtgcttggactgggcagccagatgcccgaagctgggcaccgggtctcccttcccacccctggggccccgctcccgcccccgtcctgccgccggatgccggggtcccttaccgtgagccaggagcgccagcagcgagggcaggagcagcagggctaccgggcgcatggtgctggttgcggccgcgccctgggctgggaccgcggcgggagggcggggggcttggtggggcttgggcgcgggggcagagccgggtccggccgggtagagggagcggggccgcagccgtcaccgccgctgccgccgccagcgcctgacagaatcagcaccacggccagcgcctggcgacggcgccggggatcgccgagcggggctgggggcgggggcgcgggaggagcggcttaccgtaaagtctcatgcaaaggcgcagagacccaggggcaggagcccaggctcccgctccaccgcgactgccctactcatgtgggcacacggcccctgcccttctgcgctgcccacccccagccaagcatgccaccctctttcccgttaacggcctgctaaggaacctcaattaatagctcactgtagccttctgattctccatgagaaagagcaacactttccccacccctctccacccaatcctggtacctgagggcgtcaagggtgacctgggaagacatccgagagtgaggcagctggtgaggcccgcgtgcccttgtggcagttccgtcttgggacgataatgaagatggcttttgagcgtacaaaggataataaattattactttgcgctcaataaatgccagggctccaggcagctgcatcagcagcaaactgtgctcacagaaaagcttaattatcctgatattatagttaaaagccagtggcactcgcatcctggggagacattcttcacttggcaggaggcaacctgggccaagctgtgggcagctgaaggtagtatcctgggtccccacgtagccctgggtctccaggactctgccttggcccctctgcaggaccagagaagccacagtgacagtcgatacagacccttcatgccatctctgcccaggtttctggaattggtggagaaaatggcataggcatgagagagggtttcctagagctgttattttattttattttattattgtttttagagacagggtctctgttgcttaggctggaaatgcagtggcacaattatattaatagctcacccaaactcctgggctcaagagatcctcccacttcagcctctcaagtagctagaactacaggcatgcacccccaagcctggctaatttttaaattttttgcagagataaggtctcattatgttgcccaaactggtcttgaaatcctggcctcaagagatcctcccgccttggcctcccaaagtgctgggattacaggcatgagccactgtgccctacggctgttttagatagagacttgaaggaggcccaggggtgtagcctgtactattaaaggcatggaaaaataactttccagggccctgcttgggctgaggagccccagtgagtcacaggacagcaagggggcagtcacagctgtgccatcctgaggctgctctttaaaggcaggggctcatggatgggctcacttgaagagctttaatgggtacaatgggacaggatcctatggctgatgttattattccctgtagaggaataggagggctgaactccctattgcccctgggagaagggcagttttttgtttagtttctttttacatgaacttggttgctctccaaagcttccagactccagtcattgtccagtgtccttcctgaccctcatcctggaagcaggtggtgaaatttctgctcaagttccttagagagtgttttggtcctcttgaccagagtctcccaactctgctggttggattctctccagaccctcttcttgtgggctctggggagctgtgatgactgctgtaaagagtcccaggcagcaggcagatggcgtgtggaattaggaagacgctgggatttctggacagttgttttgagaagctgaggaaaaagagggcagcagcagaaggatggcaggaagaaggaggagctgatgcaagaatcaggggtgaggagaggaagccaggaaagaaggtgcaagaggggaggcagaaagagagttgccaacagaggaagggaagagacacagaggtagaaggttgtgtgaccgggggaagtttaggaaaatgctggcaaatgtcatgagattcctcttttcctccttgaaagtattcctgggctcctctagtattcctggtccctcatggctaggcagcttgggcaaggggagtgagtcatgacctagggatgaatcttgtattgccaggatgattcatggggatttggaggttggtggcaggcttgtctgactctcttagcaacagggctccttgatgggctgggcactatgcacataaaggagggggagagaagccatcctggaacttgtcacatcaccttccctatggcctgaactaacctagagggtccaatggagactacaagtcccagaatacagtactgtaccctgagctcagaagatgggcttgtactgcatgatgggcatgacaatgcaccggggctgtccctccctcctaaaggcagttaacatagcctttatgcagtgggttcctaggcaggttgaggcagagcctgggccaaactgggaaacagcagagcttctgtcaggtgccctctatcatgccctccaaggggctcgtcctaaccagaccttgatattacctacaaattgagaacaataaaatgcccaaggggacaatcagctgtatacagggctggcaggcttatagtctactcaattcataggcacctttgaaagtggcagtctgggtggacttgcaaggctcccctcactgctctcacttctgttctctgcatcccccacctggctttttgctcccagagaaccctgggcttcccctgtctgtgtaattgcttgcttaattgtctgtctgctctactagttgttgactttgcgaaggcacagaccgtgtctgtctcatctacccacaatctagctcagtggctggcacatagtagatgttcaataaatatttgtgaataaacaacagggatgaggagtgtctaaagcccaaggccggtcattggtgtcaaatgagtgctgtgagataatgaagaaaagggcaattgtttcttttggggatgaggcaaggtcagtgaaatcttcacacaatggatgggtgaaaccaagttgaatatgtttttaaaaattaattaattaatttttgagacaggttcttactctgtcacccaggctgggatgcagtggtgtgatcagggctcactgcagccttgacttcctgggctgaagtgattctcccatctcagcctcctgaataactgggaccacaggcatgagccagcatgcccagctaattttttacttttttgtagagatgaggtctctgtatgtagtccaggctggtctcaaattcctgggctcaagtgatcctcccaccttggcctcccaaaggactgagattacaggcatgaaccactgcccctagcccaaataagtcttatgattcaatggagagggagagggaagacattcaaagttggggggtgtagtttatgcacagcgttggaaaatgcaagctagtctgggtcagtgagaagactggttctgctggagcagagtccctgctgggaagtaggagaaagggctagagtaggctggggcctagctgtgaatggcttggtggtcacctgagctgaaggacatccttggtggctatactgaagggattaccccatcacgaagatatttgcactgaaacagagcaatctggcatcattaaggtatgttttcaagcactgtggcaagtggtaggaactgtggggttcactgctgactccgaagccagggggtggggtgtgtgtctgagctacagtgactgaattaggtttgagagaccagagagagggaagaaggggctcttcaatcccagacaccccaacccctgcccagacaaagccagacatacatagagcccccatccatccattgaagctggagaagccagctttacttccccagttccaaacagcccatcaatctgtaggatcacaggcacattggtgacttattttgaagtctctgctgagatgacacttgctttctgcacgagaggaggagaaaattactctcttctaagacagctttcaaaccagagctatatcttttgtggagccaaaggggttttggtgtttcagggaggcaagggcaggggctgccacctcactccagaggctcccaggggttcagagctgcctgcttacctcaacccacttcatggagcaggattccagaccttgcagctcctggaacagtcagggatgccagtgctccagccagggctccctgcattacccaaagtcaacccattgaatttaggggcaggaggagggccctgctctgataaatggagagtcctggctccaggcatttgctcttgctccaggattgactgcaggaagagctcagggtagatggagacagcagcagaaagtggtttgatgtgagctactttccatctccaaacagaggcctccagcctgcccaccacccccagccgaggcctttgatcctccacagctccataaatgtttaatgccaccggctgggcaggaatgaggcaggtgctgaaacagggagactggggataggacttaagacgtacaatgttggctagattattttcacataggagctctgggatggatgggaggaggctttcccccatcatgtggcaggagaagtcccagggttcaaatttggggcactaataaagaaaactctttgaaaactaccaaggggatgaaaataaatgaataatcaattgcaaaagcccaatctctggtttgattgaaggagaaagatggaaagttaaatgacaatcaaatgcaaatacagctcaacaaacaccacagcaattaccaggcgcaggaaccacatggtgcttgcaggcagcgggggttggcaatttggaagcctgagcctgtgcagaggtgacgggcgaggggccattttaatggacggttaaatagatgcaaaaaaaccctgcatctactttgcatacactgctgatgagtggggtgctggaattctggcatccagagggaggttgttctaccttccgtggctgcctctgtatcatttcaggaggccctgagtacctgcggtggggtgaggccagagtgagctccagctcagatgatcagggagaaggctgcaccagtctcattggattcttcacaccagctggtgctgaaggttcaggggttgaagttgaaagaagcccgtggggtcctccataaaggactcaaggtgctggccttccaacagcctggtaagagtggctttctcctctagatttgcataatgctttgcatctcatttgaatactattaatttggtgtcaggctaggttggcatggtgtaggaaagagaacagctggccttctccatcccctctgtaccacagagcttattctaagcatagccttctgcaactggggggcatgaggcctccactttcaccatccccttcatgttccctgacacttagtctcttagtgaagccagctcctaaaagccaaggctgcctggcattgtggccacctgcagggttatgctgaaggaagaagaaagggtcccccaaggtcactctcaccagacccagagacaccatgggaggatgctgggggcctttgtcatcccaagcaatcaaggcagcttggcttggaaagggtccaaagataataaccaagagagggagggaacaaagacaggcgataatcccagagaaatatagagggctctagaaataaaatcctctgaactcaatatttctagtgcttgaacttacataaaatacatctgtccagaggcattgggtttatggtgctgctctggggctgggaacctggtaccaggttgatggccatgtgatgagagagtgagtcaccaggtggggtgagttcctgagaaagagggaagaggccccgggtgcatcctgtgggctgcccctggcaggtgggcatcgggaggctacagggagatgcggatgagttatttaattgaagaggaagagaagtgcattccatgcagagggaacagcatgtacatcggtaggcaggactaagagatggttagtgtagctggatggcagcaaacaagagttgtggtgtgggatgtagctggagagctggggtgtagcaaagcttagtggctggtatgaaatctctaggagtcctacctgcccatccatctgtccatttattcgttcgtccttcaccctactacctcccaattcattcatcacccactcattcatttactgaatgagtgagcacttattgagcactgtgtgtatgccaggacctgaactagctactggagagggagagccctcaaggagcacccagactggggaggggaaacagccccaacaccctgtaagacagcatgtttatctccacaaggtacttaaacaaggctctggaagccctagaggccaagtctcccatgcttcaagcttcccaaggcaagggtccttcattacctccggggagatcttccattcacacagatcctcctggcatctaatactattccttcctgctacaaaagcagcccgcttcttatagccccagagtggcagggagtgtttctgatgttccttctcattgaccctttatttgggccttagagacatcacagtctcaggagaacccaggggaagtgatatgagaacatggtcaagtctcccttagacatcagaacccaggcttagatacacttctagccacttccttttctgggcatgaaaataggacagaaattcccaatgtcccttaattcagcatattccctcccccactcctccttgaactacttgtcctctatttgtgacatcacaatggtctctatggcaactgattgtgaggtcaccagtccttaaagcaacagaatatgtgggtccagacaatggcctgcaagagaaaggaagaatacaaaatggaagcctgggatagagatcatctcctaggaaagggggaggccacccaaggcctgtcagggggagggctccacttctcagcccatctgcagtaggtccacattcggggtaggcaagagcaaggcctgctggaaagggaaactgctcatcaagaaactgagggaggctgggcacggtggttcatgcctgtaatcccagcactctggaagtccaaggtgggtggatcacctgaggtcaggagttcgagaccagcctggccaacatggcaaaaccctgtctctactaaaaatacaaaaattagccgggtgtggtagtgcacgcctatagtctcagctactcaggaggctgaggcaggataatcgcttgaacctgagaggcggaggttgtggtgagccaagatcgtgccactgtactccagcctgggtgaaagagcaagactctctcaaaaaaaaaaaaaaaaaaaaggagaagtggaggattgagggtcatcctgagcattggctggacctcagaggcaggcctgagttcaaatcatcccaacctaatgtttgccttgggcaagttttggaacctccatttctttacctatgaaaggaaaatgatgccacttgcctttcagaaaagtattcagtgagataacctgttggagagcctggcacatagtaggtgcttgtttctatctacttgtacttgtttctatttctttttctaccccctcagcccttatgcctaggatcttgcatattatatgtgccttattaatgcttgcaattgtaagtgcactgtaagtgcaggatgagggctacagggcaatgtttagagcaggggaagtcaatggacctggattcaaatcctcgctctgctatttgctagctgtaagcctttgagcaaatcacctttgagcaaatcacctttctgtttcttggtttccttaactgtgaaatgggagatagcaatactgttgtcttcatagggttgattaggactaaatgagaccctgcaaataaatagcagagcttggcacatgaggtgcatggtacttaaacttgagtgaggctgtttctgcatgcgctgcacagtttgtgttcactgtcagttttcaggaaatgtgaattaatctgtggggtgtccagaaccggagagtgggtgaacctcaagacagggccataggatggcagtctctccccgaaaggggtgaccgctcactttctggattccctctagtgcggacacccagctcataccagtcacaggggctgggtgctccttgaagtcagagtgaactcatctatgaagcccagaccagggcctgacacatggcacaggctcagcaacagttaaggtaaactgagttagaggatatcttaataatatactggctaacatatattctgtgcatattctgtgccaggctctggtctaagcactttacattttgatcctcacaacaacctatgagctagatattatccatttttaaaatgtgggaacagagaggctaagtaatttgcccaaagtcacacaactagtaagcaatgacgaagctcggatttgaacccaggctacctggctctagaacctatgttcttaactaccacattacccgcagccccatgggctgggtccatccattttactatatctgccaccacgaatttcctcccccagctctctcacttgcccctctcttctcccagctgagcccaggcccagtgcaactcaaagaatggaaattctcttccactagcctcagcaatctgcctccccctttgttgaaataaagccactgccacagccaaagccaccaccggatctcttgcttatttcaagtcctcctaaagcttgttgagttcttaacttattaaagataagcacatggaaatagggagcaaatctctttatttatgacataatctccagcccagaaaagcggcaggaacggtgttgcctatattagggaaccaataggaaaaaaatcaattagatccgccagaccgtttcgctattaactttcttctgatgtttctcttaaggctggccatgggggtctccaccagcagctgaggtggagagagaggagagctttgtaggaacagagaaaggaatgtcacaaggaaggcagctgaccaggcttccagacagacaggggaatcttttcatcatggtctccttcactgctttccaaatctcatttaacctccatgtttcttgctgcaatttcagttggtgtctttaggggcaggggagtcaattggtcactgttggcttcttgcagacttgaaccccaagtctgaccacatttttgcaagacccatcgggagaaggatcctcccctttctgaaagaacaatattctggaggggctcttcttgactgatgtttagtaggctcttctgctggataattatgcctcaaacaaccccaagcagctaccgcatgaggtcttcacatccatctgcctgcctccaggagcactttctaagctatctcccagagatagggctcacccttattcctgagagcctccggtgaggagggtgccctagctcccatagtaaccccagaattagtctccttaaaggctggggatcatggcttgttcaatagtttttcttcaggttcgggcatatagaaggggctcaataaatagtcacagaatcaataactattacaaaagccccattgatggaatgctcgctccgtaccaaggctgagaagggtgatctgtcacccaaagtaggacccctttgttgctccctgaaccaacaacccagaagagcctgccagttttgtagttttgtttttccttttcttgctatttggccaggagcagcagtagcagcagctccaagaagtaagtattattattattattattattattattattatttgagacaggatctcactctgttatccaggctggagtatagtggcacaatcatggctcactgtagcctcaacctccccatgctcaggtgatcctcccatctcagcctcccaagtagctgggactataggcatgcaccaccacacccagctgatatttgtatttttttgttgttgttgagatggagtctcgctcttttgcccaggccggactgcagtggcgctgtctcggctcactgcaagctctgcctcccgggttcatgccattctcctgcctcagcctcctgagtagctgggactacaggcgcccgccaccgcaccctgctaattttttgtatttttagtagagatggggtttcaccatgttagccaagatggtctcgatctcctgacctcgtgattcgcccgcctcggcctcccaaagtgctgggattataggtgtgagccaccgcgcccggcctatatttgtattttttgtagagatggggtttcaccatgttggccaggcagaggaggaagctgagtcaaggaggagcagtaacttgtccaggctaataagtgaattagatattctatgtccatccactgttggtcattaggaagttcttcttaaggtctaacctaaaccttttctgtttcagcagcactggctccttcttagtcccatggaagcacagatcaacatcattgcccttgcaaacttctctcagcttaggagagtctactcgctctttgcacattgttgacatgaaatgaatattaaacaccaaacctcatagaggccagccctgctgggcgagcaatgaaccaaccctcctcatgcctgttcattattataattaacattgagccgaggttggtggtgacctcgccctcgccaggtatttgggctgttttagcagcttattcagatcagtgacagacagctctgaatagataaactccccgccatccagacgaatcaattgcaacactgccgtcacaacaagcccaataaatcaatctgatttcaggcgacatggtaactcagtgctgggcaagctggttttaatttccgcgtggctgagacccagcttcctctactcactggagcacccctctttcccagctgatgctctgtgcacacaggtgcccagggccctcagaggactcaggccaagggggcagctacagggaggacagggtaaccaggaagctatgttactttgaggaagactcttgaacccccagacccagaagcagctgactcagatccactgctgggatccttgttttgctggcttcagcttcgattttccgctgccctttgcaaaaaaccaagcctggaggcctctctgggctgcctcccaaatcaggaagctgcagaggtaggctgcctatctcaggcaccaggacaactgcctttttggtctgggagattgagtttgtctggcagggcaacaaaaaactcatcaggacagatgtagtcatgtattgggtgcctacttaatgcccaggcaccatgctaagcagtttatacacgtcatcttcttaacctttgtaacagcccaaagagatcagtggcaatgatccacattttgcagggaaggaaaacaaagctcaaagaggttaagtaacttgtcctgagtcacacagcttgtaagtggtagagcgtggatttgaactcatgtgtattagacttctgtgcctaagcttcagccaccacagtctcctaaagatgacatcagaggtgcccatactctccccctggctagatattacctggttaagtaattcctactttagagaggaggaagcagattctgagaggagaagccagtgcatttcctctaggctcccagggaaggggagcctttctcatgaattcttacaatcagcaattgttccttgaattttcatctcaatgcttcaggtactgagtagaggatgttgaggaaagagagggtcaagaggctgagctggcctccttcccacaccccagctctgtcccaccccacttgcaccccatcacattaatagatctagatggtgaggtgaggggctgggacaggcagcagtgtgttaggagatgtggctttgaagtcagcagatctgggtccaaattctagcccaactacaacttatttgttgaatacacctgggcaagtctattaaccccttggaacttccctcatcctgtccataccgtggggataatattactcaaaccacaggttgtgcggattaagagggaaaattgcatgggaagtgcctggcataaagtgggtccttagtaggcattgggttctttccccctcttgtccctgctctttctgaaaccccatgccttaggtgcccagttctgaatggccgaggtcagggcatttcaaatatgttttagccaagaaactcttttgtttttttgagatggagtctcgctctgttgcccaagttggagtgtagtggcgtgatctcactgcaacctccacctcccaaagtcaagcgattctcctgccttagcctcccgagtagctgggactacaggcgtgtgccaccacgcccggctcatttttgtatttttagtagagatggagtttcactatgctggccaggctggtcttgaactcctgaccttgtgatctgcctgcctcagcctcccaaagtgctgggattacaggcgtgagctaccgcgcctggccagctaagaaactctttaatcaaaagacactttatgaagatggcaaggatacaaaatagataaagggggagttggtcagatggtgatagggggctgggagttctcctggcttgaacccctctctcaccctcagccccaaagcagccgctcaagtgctttcctcaagccctgggccagcacataaagggctgcctcactcttaggtgtcttaggtcacgggcttctcaggagctcagaagtgatcacctctggtgatttctggctccaacactatctctgagccaccagctaccttgaacctgttctggattcagggcatgacaatttaggtgccaaatgggcaaagctgcgtctggccatagggaggctgtatctggctgctccgggtgggaggtggggttgggcgtcgcagctgggagagccatagatctgggaaggggtgggcagatgacccaggattgtgcagggggtctctgtccatcttgggcagcaatggacctgtgggcttccatgggaagtagatgcctgttcaccaggtccagcacttaatatcctcccgagggaggcagggaccacaggaagtggaagcgcagtggggagagtgacatacaacaccatacagtgagcaagtgacagaagtgaattcaaacctaggcctgtgggctccagagggctgggactgccgttcattctctcctgtccatacagtggctgtcctctacccccagctctctgcagagaattatctatcagccctttcacccaccaaacacagaacatgaagagagaaacttaaattgtagcaggagggaatgggattagctactgggaaggacttcctgactcattagcttgtctctagaataggttattagagaggcagtgtgctctctctctttggagggatttcacatggggcttcagtgcagctgggcccctgtggcttccacttcctgaaagctactgagagacaagctgacccctgatgtgtatggctttgtttttcgtaacgtttattttttgaataggtaatacctgtacatggttcaaataataagggtataaaaggttgttcactgaactctccctccagcccccgtctccagcttcccctccccagaggcaagcaatgttacctgcttcctgtctagacctataagagcaaacacggacacatactctttcttgagtcctgcttttaatacacaagatgtagcatcccctgcaagctcttctgtgcctcgcttttgtcacctgacaatatatcttggagattactccgaatcagtacataaagagctgcctcactcttaggtgtctttttatggtcacggacttctcaggagctcagaaataatcacatctggtttgattagcttcacatttccatttacaacgtccctgcccagagaggcaagaaacctctccaaggtcacgcagcaaggactagggacgcgcagagtttctccccctcctcccgcctcagttcccagctcctgtcccccgccacctcgaggctgagcgccgcccaggtgaccagaagggagagggggaggtctctaattgaaatgccctccgcgctgcccatttgcgatcggcacctggaggggcgcgccgtgcacaatgagggcggggccgtggggctccgggtgcgggcggcggccgagtgcccacgtgggtgcaggctaggccgggctgatttccctggaaccccgcgccgcgtgcttccctgtaatgagctcccagggcccgaggtgagcttcctcggctgctcacacggcagccgcgtggcagcaaagaacacggggacttttttcttccgtgcctgacagctcattagaagaattaatttactctagcgtttgcagtttaaaggacattatttactggttaattgttgttattacaaaatgttaaatatcattatttatttcccaggccctgacagcttttctgacaggaatttattaggtgagactgtatcaccggtaggcacccctgtgcagggtagcctaagagtgggcagtttgcccctaggcctagctctctaggcagggcgggcactcctaggggcagaacaggaggggctgaaccctggcccaccccaggacaaaggatcattgtctcctcctcaccccccatttctgccccctgatgtgcgtgtgttggtggggcaggggggtgggggctggcagacggggggcatgccttgcataaagctgcagtttaggggtcaggctggcagttaccggaggcccagcggccagaatgaggtccagactttgagtccttccctttaaacagttacttacaagaatgttctcctctcctgaacgcacagaattgaagagctggaaggaagccaggtggtccgctggtgctgagactgcaaaccagtggcctccaggtggtaaatggcctatggacttgagtttgacctattcaagagacttcacataaaaatccactttgctggcttcccttgaaagatcagacaatcttgccacaagacttgacccacagtcttgcatcaattggcgatgatcagcgggcaagaagggcagcgctgtgcaaggagcatgcctgctctccaacaaagggagggtgccaccttccccctttgttgccttgtctacattattttcctggcctctgtgggcatttgagttttcaaccccgatctgctctactaatgaccatatatagatgaagacactgagcccagagaggttaagtctctgatggccaggacgacagccccactctacttttcttttcctttttttttttcttcttcttcttctttttgttttttttttaggatggagcaatcctttatttttatacactttgacaaggaggttttccataaacaatctttccagtgaggaacagagaacaggaaattcagcctccagacatcagcagctgctctgctcagggctgaggctcctccttgccaatgtggtgaggtggaggggtgtacttcccttcctttatcagcttatcctgctgcttcctgatggtacctgcacgtctcatcgttttctgccgaagcaaacactctacgaaatcatcagattctatcttgcactctttctctgcccggataacactgattccatatgcacattctatccattctttttcaaaagcatggcatcgagcagcaatcttgtagggctgttcagcactctggattgtccaccattgatctatgttaaggccgaatcttttctggatggccaagaaaggcatggtgatccgatgctcatgtctttgtgtcttctctggccgccgcttcaggatgacccctagtctacttttcaccacactgtgctgctccctgaatttctctgctcccacctcctctgggtccagtttagagtgaattcagaccgggaacgcaggtcttcagcagcttcaggggcaggaacaagaggcagcctagtgagaatttacaaggatcatggccttataaatagcatccacttattcattcagcaaacagtttctggggatctactacgtgatgtattaaaatgattaggacccaaattgtgttgttgaggaattagtctggggacactgttcatgaaacaagttgcacaatgacaatacaaggagatgtccgagtagtagaggcataggaagatgggattggtggggctggagagaattcatccttcatgcagcgttttctaggctggatggatggcctgcatcctcaaacacagacgcacatgtcttatttaattctcacaacacagcggattgaaaatatctgtcatcagcttataaataacggctataccaggtctcggacttgctgtctagattcttcccccagggtgggtgcttgcaagcaactccagccctggggaccttctgttctagcaggtggcacccttgccatacagtctgttgactggcaaccacatctcataatcaggctgattaccctcattttacaagtgaggaacctgagactcagagacaggtgacagaagctgggtgttgacgggtgaaatgggccctgggaaggagagagagttgttgtctgagaccaacacccagccccgggaaatgtgggtcttgctggcagacttcaaacagtggccctttagacaaggtcttgggtcccatcctttcctccccaggaacctgacagcagtgggtagcctcaaggaaaatgtggagaaccaaagggagatgaaaagttcttcaaaaaagtatgaaaacaggttcaactgagccattactgttgctatgctgtatattattataaagttattcctgcctggcagcctggtttatgttagaccctacctcatttcttctaggttataggccctaattccttgtctggtgagaaagaaagagaccagcactattggagtgaatcctgagctgattcagaaactgtacagcttgaggaatttcacagattctcagtcagggcttgctgtcctttggaggtcttcaccacccccctcatttcattttattgccatattaaatttttaaaaatttaattcatttttggaataggtgatacgtgcccaaagtgcaaaattcaaaaggcataaaagagtatatggtgaacaggctttcccactgctcagaggcagccagtgccagcaattgcttctgtttcactgtttgcaaaaatagcattgtttctcttttccgttcacatagaaaatacagtaattcctgcagaagaaagtaaaaaatcatatgcaatccactatttggagttgaacattgaacattgttcacatttttggtgttcacatttcagccagccttttctctttgcaaagatacatgcatctatagtcataaacttgcataacctggttttattacttgtttacattaaatgtgattcttcaaaaatacagatcggagaggatacaaactaaactgataacaatgagtaccttggggaagaataatgagattgggtaaggattgaagggaaattttttagaatgaaaatatattgatacagtacttcctcctgttattcctctggaatctgattttaaatgactagatcagaaggctactatttaatcaatcctttattattgtggttttaggatgtttgcaagtcttcctattatagacaaacctgagatggacatttttgtatctttttgtaggttggagcaaaagtaattgctgttcttgccattgaaagtaatggcaaacccaatatatctttgcacacttatctagtatttccttgggggtgctttaagaaatggaactgctgggtcaaaggtggtatatactttatggctttttgatccatcacgtcaaatttccttccctctgggctgtcccaatctcctgttccacgggcagagcctgccccctactcccacatcagatttattcaacacagcacacgtgtaaggtctgtgagacagtgaggcaaactcatgggaggctggggaagcttcttcttggggtgaagaaccctaggatgctggcagcagcccagagggacctcagtggccaaagggaaaaggaggaggagcaatgaatgggtgtagaatccccaggcaggtggggcaggggcctccaccagtccaaatcacaaggccaaaagttgtacagcaacaacccaaggctggacttggatcctcaccagggacctaagcgccaccttctgcagtggcaccgcagagctaaaggcacagctgagatggttcctcttggagttcttctagcccatgagagttacatggcctcaagagcatgcagacatggaggaccttctaggactggctccaactcctgccttctctaagtgtctcagatttgattccatgtctcctctttgcttccaggtgcttgtcactgcctaatacttgtggttgtcacccacagcctttgtactcttagattctctggcaaattgacccatttcatttggaaagcttcagaagaaactgggcagacacaagacggacttgttgatttaattgaaaagatggtattctgaaagcaccccctcccctctggagcctggcatcttcacagtagctgaggtttcctcttgatggggcgaaaagagaaagcccaagattgcatctcattggtgagatgaataatacatttgaagcatctcacaaactgtgtttgatccgcctaaagcttcaaccgttaacgtatttctctttatccccagcaagggagggctgggaactgtcaacgttttcctttctgcctaatttgtgccttctccatgaagagaaaagcagggcctgggggagggaaggaggcaaggaaagagaagggtgacacacacctcctggaacaatgcagtgagccacaggactagggggtgttcctggggcttgggaacactggggggtcatcaggacacagcaaggggtggttggctctggggagaggggctgtgctatgtgtgctgggacctgtttgcaggactgtgtgcccctaagaagtcagtcccttggagggtccatctcctgtgtttctggtgggaaatcagaggtgggaaattgagccttgagccttgccagttgccaagcaccaaagatgcttccttcatctcatgggaagcagagagtaacagtgttaaaaactggccccctggccgggtgcggtggctcatgcctgtaatcccagcactttgggaggctgagaggtgcggatcacgaggtcaggagatcgagaccatcctggctaacacggtgaaaccccatctctactaaacaaaatacaaaaaattagccaggcgtggtggcaggcgcctgtagtcccagctacttgggaggctgaggcaggagaatggcgtgaacccaagaagtggagcttgcagtgagccgagatcatgccactgcactctagcctgggcaacagagggagactccatctcaaaaaaaacaaaaaaaaaacttcccctgactgagctcagggacagcactgtgcctgtgtttttaccaacatgcttccagtcactcttcgtgtctctctgcaggccgaccttagtgctaaggatcctatccaaggtcagaccgagggtaagagtcaggctaccgggtccagaagttcacgttcttaagtgcagtgccattctccccctccctgagtcttcatgactttgcctacctaggctcctattctggaggagggtggttacgagcacagactctggaggaaggcggctgtgttctgaatcctctcaccaagcctcactttcctcgtgtgtaaaatggaggtgttaacaatagtaccgactccataggattgtggtgagattaaataagtaaatatactccggttctcagagcaattcctggagcataggatgcactgtgtgtattagctcatttgtatttttcccacttcaatgagctggtctacgtgtgtatgagctcttattcccagcctatttctattccacagtctggtagcagccacccctcccagctggccttgaacctatttcatctcccctcttgggacgaccatctctgttccagtccaccttatttcctagccctcttcctcccctgcccagcctggcttggggcgccaccatcagaccccgccacataaccctcattcgtggaagcttccctgagaccccccagagtaccgttgatgcatatcagattccaccaggtcttttgcctgagttcttcttttttctaaattaaaaaaaaaaagtattggttggtttgtttgctttttaagagatggggtcttgctgcattgcttaggctagatttgaactcctgggatcaagtgatcttcccacctcagcccctgagaagttgggactatatgcatgtgccactgtgcccagattaaaattttatttttaattgacaaataataattgtatatatatttatggggtacattgtgatacttttattttatttttattttagagacagggtcccactgtcacccaggctggagtgcagtggtgcgattatagttcccagcagtctcgaactcctagcagtcctcccgccttagcctcctgagtagctgggaccacaggcatgccgcaccgtgcctggctaattttattttgttttattttttgtagagatgggggtcttgctttgttgctcagactggtctcaaactcctggcctcaagcggtcctctcttctcagcctcccaaagttttggggttacagacatgagccactgtgcccggcctgatgtttcaatatatgtttacaatgtggaatgattaagtcaggctaattaacaaatccatcacatgatctcacttatatgtgaaatccaaaaaagttaaagtcatggaagtagagagtggaataatggtggctgggcgcggtggctcatgcctgtaatcccagcactctgggaggctgaggcgggcggatcacctgaggtcaggagtttgagaccagcctgaccaacatggagaagccccatctctactaaaaaatacaaaaaattagccgggcatggtggtaggcacctgtaatcccagctacttgggaggcggagacaggagaatcacttgaacccaagaggctgacgttgcagtgagccaagattgcaccgctgtactccagcctgggtgacaagagcgaaactcaaaaaaaaaaaatgatggtcaccacaggctcagggagggggttggagagagaggaactgttgatcaaagggtacagagtgtgtggtttctagtaggtcctctcattcccatggacttcactgatttgggtggctcttttatctcctgtaatggccagtacaggaaacgcccattccctcagtaaccagcagcacactttcgcatgtgggagagcaccaagagagatgacatctctgggagggaaacagagtggatagtccccactggggaaggaacaagggaccgaggagtgagagggatgttcctaataactagcagtgcgtctccatcctaagtcactcattcctatacttcagtttcccagcctccttcctctgctgactccctgtggggaagctgctcattgtgtccaccctcagtcccccaagttgcagctgtgaactgggacttatgcgcagcagccaagagacacctcagaattcccaagtttggaacaggaggaaggagtctgccaaagcaagcggtgaaactagattttggagaggacttcaagtgtggatggtgagagggtggtcctggggaagggagacctctctcttcagggcaaggcaggcctggggtccctgcagcctggcctgcatgcctgcccagtgccccagagcccttctgttcaggcctggcatcccacagaggtggcattctgctcaggagcttagagcacagacgaagaggcaggcattgccaggaattgatttgcggaagcagcgggggctttctcttcctccttacttccttggtctttgatctcctgtcctccctccatagtccattttccccctccttcccttgatttattcctctttttctttctttagctgaatcatagccactccctagaaggcaaaggctgggagaggcagttctttgtcctctttttcccttaactaggtgggtcctcgctgtccagatctcagcctcctacccaagtcatgaggcaggatttggccatggatggggaaaggagacacacacacacacacacacacacacacacacacacacacatatccaaggcaagagctgaaacaggcagaaaaatcaaggaaaaggggagaggcaaagagagaaagcgttcagccatcagaaagacagtaaaagacaagagttgagaagagtcagagacaacgaaaaaagagaattcagcaaattaaaaattttacaaccatccagcaagtctgcaaaaatgatcttccctgcggtctttcatttatctcattatctgactcctaatgtgctttttcccccctttcttttctcgccacacttggtgcaaaatcttattagatttttttttttttttctggcaggggcttcatatagtctttttcattacatttcctaataaaagcaatcactaggacggcatggctggaggattaaaaagccacctcagcagcctcctggccagcagaaccatgactcgccagagccttgttcacactgccaggggagtgggccagccccagcgggtcccgggtcagggaaacccaggctgtgctgtggaatgttccagggcacagataggttcaagatattatgggagaagaactgaaggaggggtcccttcccagagctattttagagcaggagtgacagacacctgtatttaacccagctgatcctggctaatttttgttcctgaggaaggaatattttgggtctttttctttggactttggcccactctgtcccatagcaaatttttatgaataacatcagtgatataaaatatttatctcccttttgttttgagatagggtctctcattctgtcacccaggctggagtgcagtggtgggatcttggctcactgcagccttaaccaccctggctcaagtgatcctcctgcctcagcctcccaagtagctacaggtgtgcaccaacacacccagctaatttttctatttttttgtagagacagagtttcaccgtgttgcccaggctggtcttgaactactgggccatggcctcccaaagtgctgggattgcaggcatgagccactatccccagccaaatctttaccttttgagtagattttattttgttaggtagacttttttttttttactgtgtataatacacataacatttacaatttgcaatttaaccattttaagggtacagttcagtggcattgagcacattcacacagccatcactgccatccatctccagaactttttcatcttcccaaaatggagatctctccccattatacactaactcccattccctctattgccagcccttggtaaccaatgtctactttttgtctatgaatttgtctatgtctattttaggtacctcatataaggagaatcataatatttctcgttttgtgtgtgccctgtttcacttaacataatatcctccaggttcacctgtgttgtagtatgtgtcagaatgccatttctttcttcttcttttcttctctatctttctttctttctttctttcttttttttttgacacaggatctcgttctgtcacccaggctggagtgcagtggtgtgatcacagctcactgcagcctcgacctcctgggctcaagcgatcctcctacctcagcctcccgagtagctgggactacaggctaccacacccgctaattttttcattttttgtagagatgagattttgccgtgttgcctaggctgggtcaccattttttttttaaggccaaataatatttcattgtatgaatatgtcacattttgtttatttcatcgtttttcaaaacagaaacattttcttttcttttttttgagacggggtctcgctctgtcgcccaggctggagtgcagtggcgcgatctcagctcagcgcaagctccgcctcccgggttcacgccattctcctgtctcagcctcctcagcagctgggactacaggcacacgccaccacgcctggctaatttttgtatttttagtacagacggggtttcaccgtgttagccaggatggtctcaatctcctgaccttgtgatccgcccgcctcggcctcccaaagtgctgggattacaggcgtgacccaccgtgcccggccaaaaacagaaacattttcacataaggaaagtgaaaagcagagaaaacccaccagattcccattaatacaatggttctctcatttctcttttgctaataattatacctccatcccatccccgaacaatcctgtcctcccagggctgctccaaacctctccaagaaagcagcttggcagagcatttggcatttggtaagggccaaaagttacggggaaacaggtctgataaatcaagttaaaggagagcaaggaaacccctataaagcagcaagacattttattgcctgggttataaattggcctgaaggtatttcacacatcagctccaggatgacttgggccacacattgagtaccactggattaactactcaacttcatacgggggagactttgaagagaaccatagtcatttggaaatatgtggtctggtatgttttaaaataaaggtacaataatcaagttaaaaacaacttttcaatgacttgttgctttgaaaccacttaggccacccctggttaaccgctgcatcccttgggtgctcagccagggctgcatgagttggtctcaatcagcacttctcaaagatccgagagcatcgcagatgtaggggaggtgcaagggaagccattattggaaaagtgtgcacgtggctacctggagtgctgcaagctgctcccagcagggtctccccagtctcaaccactggttcattggttcggtttatgatgatattactttgtatctgcatggtccattgggatccttttacgtttcatttctttccagtctcctctaggacccgttttcttttttttttttagacatagttttgctcttgtcgcctaggctggagtgcaatggtgccatctcagctcactgcaacctctgcatcccaggttcaagcaattctcctgcctcaaccacggcctcccgggttcaagtgattctcctgtgttagcctcccgactaggtgggattacaggtgcctgccaccatgcctggctaatttttgtatttttagtagagacggggtttcaccatgttggccaggctggtcttgaactcctgacctcaggtgatccgcccatctcggcctccccctaaagtgttgggattacaggtgtgagccaccgcacttggcctgtttttttctctttctttctttcttttttttttttttgagacagagtctcactctgttgcccaggctggaaggcaatgtcacgatcttggctcgctgaaacctccaccctctgggttcaagcaattctcctgcttcagcctcccgagtagctgggattacaggcgctcaccaccatgcctcgctaatttttttgtatttttagtagaaacagggtttcaccatgttggccaggctggtttcaaactcctgacctcaagtgatccacccacctcagcctcccaaagtgctaggattacaggaatgagccgtcatgcccgacctcctttgttctaagtctctgccagcctcatctctgtcccagactccagaagatagcagatcctgctcaggagcatagaagcccagaggtcacaaagacttcctcaccaagctcctttccttccctcttcttgtggcagagcccctgaaatgaaatatgaatttcgccacctttctgcataagcagaagtatttattctcttcttttcccctttccttttctttttttcttttgaggtggggtctcactctgtcggtctcactttcccgccttccactggtaccagccctttctggatcacaccctttctcttcttaagaagctgcctcctcccttccatcaatgctccagggggcttttatttttcttttattttcggctccctatcaatcaaggggagggggacactttatctgaacctttggtgagcaacagcagcaaccggcagctgccagggcagtgggaacttcattttcagcgctgacgtttataaatgtggcacagagtaccagtagggactggaaaaaatcaaacagcttctccagaggtccctaggggctgctttagaatttcttctcactgggggctccttctctttctttgcaggcatgggtgggggtggggaatgttatttgcaacgtggaatgagccacattctttccctatcttcacaaaagaacttagcaggacccaagacccagggtgctgaggagtgcgaacatctgcctcactcttgatttggagaaaggtttggggtgaggggtgggaatgctgactctgttgctttttagtgatcagttgcctcatctgcaaaatgggagtaaaaatgcctgcctgtccacttcacgaggctgctgtgaagatcaaatgagatgtctgtgagtgagtgccctgaaacctgcgacaagcttaggcaacctggcgggtggttatgaaggagcaatggtgaggagcagagttatccagcaccccagggcatctggagagctttgaacgggctctgggcagaccttccccggactattccaggaacctcctctttctctatccctttaaaaattctgggctaggatccctggtggtctgttccaaacacaactggaatcgtcccaatgtcttctctaaacctttcttcctctgtccttctaaacagcaagaaaataaatgtgggcaagcctgagaggtgagagactgagagagagaaagtgagagaaagaataaagctaagattccacttggaaaagggggctgccaaggatgaggtgggaagtgggtcgcagttggttaatataataccgcgctgctgagagctctgcaggggtcctttcaaggttctgtatgagaaccttgcttagtgagatgagacccagcatgggcccagcaatcccacttcctttacattctctaaattttccagatgctgcacacaacccttcacctgctttctggcgtttctgtggatttcactcctacccaggctgtggttgggagccaaggggcagacaggatgctggcaatgcctagagcccttccctgactcgcatcaggactgcaatgatctgtacagtattttctcctaagtcatttcctatacgtagcaagattccacccagcttcactccccagaggcaactagtgttgccagtttcttactatcctcatagacagaaaatttattttctataaatatttgttcaacactttatttatagaggttaggcaccacaaaaaggaaggatgaacagaggaccatgcctgtctgtggatctgagcaattcagtgctggtgggcaattgctgcccattcattgaaacaaaagctgtaagcaggacccactcttagtggaaagcaattaaccttgggaggtcacagcctgcacctgcaccttatcaaaatattccttctttaaaacaaatatagtgattccctaaaaaacattctagacagcaagatgctcttctaaggtattccaattcatgatgacgctttagggttccatgtatattggcccctcagacaaagcctggctggtccacgcctaaatctagctctaagagtggctatcaagagattctcactcttgctccctaggaggtaggtggtcatccttgttgacaattgccactgtcttttttcaccctaggcatctggggaggaaggcatgaaggaaatgagagaccagtacacatgcagaagatactgcagagcttagatattctaggagctagtactctgattgcaaccaagttcagaagcttggcaatgacaggctgagttatttggaccgattatcccagtaaaaagaatgaaaaatgctagataaaatatcaacaacatcttaaaagccttgaagagttaataaaatagtaaggaattaacaggccaacatggaagagaaaactagaggatgcatagaaatcacttttccgttaaagagcatctgtcaattcttgcaaatctgaactttcattttgatggtctggtagagtaagggggttggaaatccaagcccagtgcctgctcattgtggagactgtagtagaagattctcccctcaatatgctgagacccccaaagggctacaccatcagggtaagggtaaaccaaagtaagctagccccattcacattgcctgggtactccagggaacctcaggctggcaactgggtttagatggttgtgccgctgatgcctggcagaaataaacacaatgtggtgtaaaagaaggcactttcataagaaaataattccaatatatttgttcaagcacagctaccagaatactgttaaagacagccaagcctataagaaaataaggctccatgagtgagactcagagaaacaagagacaaaataaaaaattcgtgaggacttcacacattaaaatgatcatacgtagactataatacaatcatgcttactgcagtcaaataaataaaagacaagcttgaaaatatttgcagggacaggaaattatgcaaggtaacaaaatggactaaagatatagtaacagcaattaaaactcaactcattaatttaaaaacagcttagatgcagtggaacagagagttagcaaagtagaagataataaggagaaattacctggaacacagcatagagattaaaaaaaaaagaggggagaatagagaagataagagatacagcatgcagagatctattgtatgtattttgcagaaagagggggaagaatgaatagggcagaggaacgtatttgaagagataatggctgagttttccaaagcacatgaaagacaccagtctacagattcaagaggtgtgaaattccaaacatgacagtcctgtctaaaccagcagccaggtgagagaggagggaggggtacagctgagccttcccagctctagcatgcttaaacttcccataaaaaccccagtgagaagaaaaagctctaggcttctcaacaagaagcaaagccttctggctttggcaccaaagattccctggctcttctaggcctttctcccttttccactgcctcaaggcctcttccctagctaggtcctggtttcctattatccatccatgaaggtcttcccttatttttatttagttatgttcttactctctctctctctttccttctttcttctccttcttctcctccttctcctccttctctttctccttcttcttcttcttcttcttcttcttcttcttcttcttcttcctttttttagagacaaggtcttgctatgtttcccaggctggactcaaactcctgggcttaagtgatcctccaatctcggcctccagagtagctgggactactgatgcatgccacaataccacgctaggctttaccttaaacctctctttctctcttgacttcaaaggaaggaaggggacccaaggcagaaacagaaaaaagaacagaataagaaacagtgagaaaaaagagtaagaaagatgtgtctgcaggcatcgtggccgagagatgggccagactggcttaggggccagtctggaggcaacaagcagaaggtgggcactgaagaaggcttagaagttgttatccagaattctgctttcctttcctcctttttctcaggcttcccttggattctctgcctccatgaccctatggctggcgggatagtgtggggaagacctgagtttgcatatctgtctatgttccctaataaacagcgaaatcagcaggtctggctgcagagctaggaggggaagaccacatctacccagaaaggagactactagagggcccaatgctggagttaatcttcctgcatgctgctgaatttttgttgccctgttacctatcaagccaatccagctcatgcaaaagctgtttacttttcctgctcccaatttccactctttccccaactccccactttagggtatagtgatatccaggctgtgaggcacaagaaagacatggaaatgcatctctgcagagaagggagggaaagctgccaacaggggacacatacctcgtctccatcccagacacaccctcacctccacagagaaacaggaccacttctgagcactctgatttctcatttttcccactgcctgctgagctttaatggggccttctccaaaagcctaggggtagaaatatacacactcggatgtacatgtgtatgaagacaccacttaatgaatacctggggatattttggggcaccacagtcagataagtgtgcaaatatggacatgtctttatgtaggattgacagagaaagacctggaaataaggctaagaagattccattgtttacctgctgggaagtttcgcctggagacagatgaaagccactccaccctccttttccttttgtctcagtgcatttccttttgtcccagtgaggtctgagggtgctcattcacgagtttatcctgcctgcccctcacttccaggctaaatcatgactttgtattttctcgaggttatggtcttagttcccaagacttttcttattttctgccctcccctggagtctgcctagcaactgtactcttgtatcttgagggagaagcattgactctaatatatgtcatttaacaaatacaaaggaagcagaaaccagggtctctgggtgttcaatcccctccacctcctggtctgaaggtgggtgctgtcctgggcactcacagagggcgctgtcagcctttgataaaccttgctgggccagcccagaacaggcatctcgccctccctgaacacccaatagcagacagctagagagctttgtgactcgagggcacctatgagagccagagaaactcactacctatcagtaaacaggagggggtgccttcttattcccaaatgtctcctacacaccatggaatactatgcagccgtcagggagaaggtgcccactcggtatgactgatgtggattgccaagataaagaaaatgaaaacaccagggtgttcttgtaccctacttttgagatgaataaaagagaatatactgtatatgtttgtctacccatgaacatctctggaaggacacaaaagaaaatagcaacagcgttgcttgcatctgatgaggagaactaagcagctgaggatagggtggaaacagacgtcctttccacagtggtctctttcgtacactatgttgttctatatgtatgtattacctacaaaaaaatgacaatgaaaagaaggctttttctccttaaagagcttgggggaaggcaggcatgcaaacaattacaatgcaatatgctcagtgttattgagatgcgcagggtgggaagggagtataggagagagactgtctaagggggcttgggggtgtcggggaatttggaagaatcacaccgaatgctaaaacctctctaggctcagcgttgcccgggcataaaggacacagtgagaagggacctgagacgaagctgcaagagcaggtagaggccagagtgtgaaccgccttgtgtgccaagctaaagaatttagattttatcctaataggaaataggcagctattaaataattttcagcagggagtgaccagttcagatttgctgtttagagagatgactctggcagggatgcggaggatagattaagaggggctaggatggggcggggagaaatgttttgaggttaatgcaataatttaggtaagagatggtgggtaggtgaccccgggggcaaagggagggaggatggcagagaagagattaaacctgagactcgaactgggccagcgatgtgtatagagaccacgcacaaagcctgctctgccgctctctgttttctcacgctggcatcctctgcacatttggatgccccagatgccccagcagctggcaggatgggtccagggagcccttcctggtctgcctgcctgcctccttgccccaggctccttggcaaagcagagcagggaaaagagaacagaagcgtttccctcgccatccaactcctaggtctctcatttattccttgctctctccggattcgggtcctctcattatttctgatctgtacagcttgccgcttccctggctcagctctcccacccccgtctgcaaagtgtcaatcaagccatcagatgagcagctcagcctcatatcctcagcgtctctgccccaggacacgagaagcgattgctgacacacacaagcagcaaggtgtaaggctgctggctctccctttaatagtcttccgatccagaatgggtgttaaaatggaatttgagtggatagcgtctctctgcctgtccctgtcaggacagccgcaaggacgggcaaccctgagagaaggggaagccttcagaagtcgattcgcttttcatttcaaggttgggccatggccagtgtctgctttcggaggagctgtttgaaattgttaatgagaagcagaatgcttgagtccaggaatccagggcagccttgtgaagtagggatggggaaatggaattgtcattttatctctgaagggatattgtattaaacaaagtgggggtgggggtatgggatacagagacgctttgtagcttccctggaggactgaacaataagaaatatcgagggcagcaggaagaactgagattagaacaaagagtgaaattccccaggccctggaaccaggggccagggagatttgaagcatctgcttccccgggggcttgctccttcttttacaaattgtgaatggatgtgtggtttttatagaatgtggcaactaatgagcatgaagctcaattactccaccaagttctctttcgatttttgatcgcacgtacacagaacacttggttgcagtgtgtgtgtgtgtgtctgtttgtgttctgcttgcctttctcagggttatctcatacacacatttctgcatagcagagtccagcttgttatttggaatagctacgtagtattccattgtgccagcgagccagagcttgttcagccattccttgtggttgagttatttcccatttttttatattgtaaaagcacagatatcaatatcttcatacctttgtctccccttgggatatggttccccaggttgaatttctaggtcagaaggtttgagctgttttacccggattgctgtgtattgcctcagccacctccaggagatcctgacaacccaaattgccaccctcctctatctctgtccccacagcactgacaacataagagattgtcatttttatttatttttgctaatttaataggcacataatagtaccttgaagttatttaattcccatttctttcattgctagtgagactgggcacacttccatgtgaggatttattgtctgcttttccttgtacgtaaactgttcatctcctctgacatcttatcaagagaaatctgggggctgatcttatatatttatatcaagcctttacatactcagatagtacatttttctcggttatgtcagccattttttattctggggagctgtccagttgtgatgtggatgctggcctgttccggggggtgggagtggcatatggagttgtgaggatttctggactcttgaaatatacatacatatatatatatatatatatatatatatatatatatatatattctggggttttttttttttagaagaaaaaaaagccaagcatggtaggttttgcttgtaacctagcactttttttttttttttttttttttttaggcaggcttgctctgtcgcccaggctggagtacagtggcacaatctcggttcactgcaacctccgcctcccgggttcaagggattgtcttgcctcagccacctgagtaggtgggattacaggcctgcactaccacacccagccaatttttgtatttttaagtagagacagggtttcgccatgttggccaggatggtcttgaactccttgcctctaaagatcctcccacctcgacctcccaaagtgataagataacaggcgtgagccatcgcacccagccagtcccagcactttgagaggcctacgtgggcagattgcttgagcccaggagtttgagaccagcctgggcagcatggcaaaactcttgtctctacaaaaaataagctgggcgtggtagtgcactcctgtggtcccagctactcagggggctgaggtgggaggatcagcagagcctgggaatttgagactgcagtgagctatgatcacaccactgcactccagcctgggtgacagactgaaatcctgtaacaggaaaaaaaaaaaaaagataaagaaaaatccagtccgatggcacctcctctctgggctcctgttttcctaagaacaaaagggctaggctgagaggacagccagttgccaagatcagtctgggggattacttgtggaatgagaagcattgctggcggccttggcaggccactgtaaggaggcagggcagctccctgtagtcatgtgggtttcctggaccattattttctcccactcattgtgggagaaatagcaaaatattgaaatcggaatcatcattacaagttctgactcatcctcagtaaagcacagtggttaaaggaacggattctggggcagacagacctaggttcacagttcagtgtctttcttttctttctttcttttttttttttttttttccatagagctggaatcttgctccattgcccaggctggagtacaatggtgtgattatagctcactgcagcctcaaactcctgggctcaagtgaccctcctgcctcagcctcccaagtaagtaagactacaggcatgcaccaccatccctggctaatttttaacattttttgtagagatgcggtcttgctatgttgcccagactggtctcaaacttctggcctcaagtgattctcccgcctcggcctctcaaagtgttgggattacagacgtgagccactgtgcccagcctcagtgtctttgtataccaggggtgttgctttgggtaagatagaatctctctaagccttcacgtcttcagccattaagtaatattttggttatggctgtgtaaaaaacctccccaaaatgttgtggctgaaaacaacaaccattttattctgtttcatggttttgtggatcaggaatgaagcttgactgggtgattcttctgcactatgcagcatcaattgggtcacttggtactatttggctggtgctaggctgggctggaggaaccaagatgacttcacttttctttgagacaaggtcttgctatgttgcacaggtttgtctggaactcctggcctcaagcgatccttcctgactcagcctcccaaaccaagataacttcattcttatatagagttctccacctggtcccaggtcctctccatgtgaactctcccatagggtgcctgcacttctaacatggtggctcagggctcagagagtaagggctccttggccaggtgcggtggctcatgcctgtaaccccagcactttgggaggccgaggtggtcggatcatgaggtcaggagttcgagaccagcctggccaatatggtgaaaccccgtctctactaaaaatatgaaaaattagctgggtgtagtggcgctcgcctgtaggcccagctactcgggaagctgaggcagaagaatcgcttgaacccacgagtcagaggttgcagtgagccaagatagtgccactgctctcctgcctggatgacaaaacgagactccctctcaaaaaaaaaaaaaaagtaagggctccaacataagaagaggaagctgccagtctctttagggctgtgccagaaagtgtcatggtatcacttttgccatattttatgggtcaagcagtcacagagtctgtgatagaaggagtgaaaaagaatttggggccatccttaatctgccaaaagtaggcataaaaatactcctaagccaggtgcagtgtctcacacctgtaatccaagcttttgggaggatgaggtgggaggattgtatgagtccaggagttcgagaccagcctgagcaacacagtgagccctcgtctctacaaaaaataaacaaaattagctgagcatggtggcatgcgtttgtagtttcagctactcgggcggctgaggtaggaggaccccttgagcccaggaagtggaggctacagtgagccgagttcgtgccactgcactccagcctgcgtgacagtgagatcccagagatcctctcaaaaaccaaaacttcaaaaacaaaaacccgcagaaactcctagggctatgaggagtaaatgagataactcatgcagaggcaaatttaccatgaagcaaatgaaacttcaaccatgggggtccttaattgaacagtttcttccacatccgggcatctaattttgtattaataattctccttttttctttttctcaaagagtaccctcgaactgtatgacaatcaagccctacccaaatgccagtatcagtacttactaagcatactgcctgggacagagagatgctcaacacggggcccctccaggcactgggctggcctggtcccctctctgtggctgaggagagggctcctcctctcactctgccctttctgtcttttcaggatcatttcttctttcttcaaaatgaaagtaaaacatgctgggaataatttcataattacaaaactgccctcccaattggcccctgcctctaccccctgacctcaccacccaccagggaggtgggtcttattctgggcatcgtgccaagttcttagcggggccctctagaatctctaaagcaaatcaggctgaagaggggaaaaccagcagggggaggcagcattcccggtgcccagtatggtctaggaggcattgaaattccagggccgaagtcctgagacaaagatcataatgagacaggaaggtggcaaaggaaggagcccatttgcatgacaataattgagccaagaatagaaagccacagggatgcaagggtgaggctggcggctgagctgggctaaacctcacaaatcagactacccagctctgctccgcaggggaagggagactgagccctgggccaggcttggcagagagggaagcgggaggacacgaccccagggcattgtgggaacactggccaggctggactttgccttcctcctcgtcctttagccgggagcctgtctttgcttgcctttgcctttgaggctctgtggctgtggggctgagtggcatcatggcggctcagaaagatctctgggacgccattgtgattggggcggggatccagggctgcttcactgcataccacctggccaaacacaggaagaggatcctcctgctggagcaggtactgtgtcccttctgcacccccagctgtaaggactgtcctaccctcctcccctgcagaagggttttcagagccagcaggctacagggcaaggccaaagggactgaatcatcaaaaattctgtgtaatttgtatcttagctgcctagtgtgtttcatggcaattcaaagaagtttcacatccctcatacccacattgggtttctaggcacatttcctctttctactgcttcccagttcctgcccttgaccaagcgtcctaggccctgttctcttccttctcactactctttcccttctgtgcccaaatggttgatccccaccccagaaaaataattggttctgctctaggtaacctaaagtaaagataattttgcctagaggcaaaggttgatttatcagcctaagaggtaggattctgtcttgcatattcctggcctctcacaccagaacccagcagaagcttctgttttttttttttattttttattttttgccacctccagataatagcagcctccttgtttgacacatgataagtgagactgaggccttatttttcctgctacgcagtgcagtctgcagtgaccactgcatatgtgggtgggccctgtgtgtctgcagggtccttcgaggacagggccacccagctatccactgcagtggactctccctttccattctgcctgcagctacccaggctggctatggtttgctcttcttggtaatgagccagagtagttagaaaccttcttcatttctctatcagttttctcaaagcccaagggattcctggttcatcctctcaggaaactcattgttgctgaatcctgaggtggttctcttaccctgagtgatctgtagccacagagaaataaagtcagcatcagtttccttgttcataaaatgaaggggctggagtagttgaactggaaggttttttctaattttgcttctttgtgaatctaagtgaggtgagattgcagcaggatggttgaagactagctaacaaaagaacttctggatgtgaacaacgttagcaaaaaggaagcctaagttagtgctattgaagaacttctatcttgattgccaagtcagtaaattggtcataaagagagaatttggaaagattgtgtgaatttttttttgtggggggacaggatctcactctattgcacgggctggagtgcagtggtactatcatagttcactacagcctcaaactcctgggctcaaacagtcctcctacctcagccttccaagtagctgggactacaagtgccaccacacctgatagtttttaaatttttgagaagactgggtcttgctatattgcctaagctggtcttgaattcctgggctcaaattatcttcctgtgcataatccttccccagattgtgtggaaatatttgaaggataaatggctcctggttgacagcacatgctgatatggctcttaacaggggatgcagtgtgaggggtaatggcttccatcatctctcttgttttccacttccagttctttctaccacactcccgaggaagctcccatggacaaagccggataatccgaaaggcgtacctggaagacttttacacccggatgatgcatgagtgctatcagatatgggcccagctggagcacgaggctggaacccaattgcacaggtgggctgtgggaggaattccttgaatcgtggggctctgcacctgcaggtacttttagtgtgtgaagtggcagcgccatggaacatttggaatgcaatgggagggacacaaggcctcaagaagtaccagatgcatggaagagttctgctgtcatggtggtcaccccacaggtccagctgactctggccaggctctgcgttgcaggactgggttcagaccatgtgtccaaggctagcagaagcagtactggaaagcctgctggcaaggcaccgtgtggcagatgcccagagtggacaggagtctgctggagtgtgtattttcaactctgtggaggcctctgcaactcttttagggcaggggttgagatagaggaggaggctgctttcaggaggattcttttttttttttttttttttttttttttgacagagtctcgcttttttgtcaggctggagtgtagtggcgccatcttggctcactgcaacctccacctcccgggttcaagtgattcttctgcttcagcctcccgggcagctgggactacaggtgcgcaccaccacacccagctaatttttgtatttttagtagagacagggtttcaccatgttggccaggatggtcttgatctctcgacctcatgatctgcccttctcggcccccctaagtactgggattacaggtgtgagccaccgtgcctggcccaggattctttatagtcaaatcaacatcctaacttttcctgaggggtcctcaccccctttagcagccctataaacccattttgttctctctgagtaccttttcctgtaggaacaaaatggggacgttccccaggctggattgcttgccagggagtgagcctccacgtctttctctgctgccttcatggctctctccaacccttgacctttcaaacactcatgggaaagaaagccaataatctgtgatgcaatgggaactttaaccatcccacctccctcccacctcctctgtgactcttaactgaacttcctacaaaccctggctctacctgatagggtggtggttattttaatggccaggaaccaagaggttagtgttctgttgcaaaaataccattaacttaagaacaaagtgaaatccattatgcaaatcagccagggcagctaattacagatttattcagaggcagctaatgcacccagcacccaaataaaggagcatgtcttgctggtgggtggcccggcagagggacccctctctgtcagttgtctgtgaatactgctgagcatcttttgctaaaagaatcgccctgggcctcagagggcacacttcctcctagcacacaatgaggcaactaagagacgttagagtgtctggaatctttccgagggagacgattctggagtgagacaggcttaggtttgacattgtgctctattccacaccagttgtgtgatcttggaaaagtttcttgacttctctgtgcctcactttttacgatagggctctgagaggattaaatgagacttttgtgaaatacttggcccaatgtctagcacctttcaataaggggcagtcccttattgacccattctgggtcagctgcattctgttccattgagcaacagtgggaggaaaggcaggaggagacagatgggtgcaacaaccacagataccaaggggagtggcagcaggaaagagggagagggatccttgggtaggagactctcagaagcgcacaatcctcctctttgccaggaggacaggaatttggacgggctttggaactggacctggctctaaatctcagctctgacacgctcagctgtgtggtttggaacgagctgttgaacctctggtgagactcagcttttttcatctgtgaagtagggatactaatacctgtgtcatggtgctggggtgaggataagtaggtaatgggcttagaacagcacctggaaaaccatcttcctcctcctcctcaccatatatgtagtgtttacaataagaaactaggctgggcatggtggctcacgcctgtaatcccagcactttgggaggctgaggcaggtggatcacctgaagtcaggagttaaaaaccagcctggccaacatggtgaaaccccgcctctactaaaaatacaaaaagtagccaggcatggtggtggacacctgtaatcacagctattagggaggctgatgaggcagaagaatcgcttgaacctgggaggcagaggttgcagtgagccgagatcacgccactgcactgcactccagcctgggtgacagagtgagactccgtctcaaagaaaaaaaaagaaaagaaaagaaaagaaaaaactaagagttgcctaagtacctgacacctataactcattccattctcctcacaatcttatgagagggttgctgccgggtagtcagggtcttatcccattaatgcaaatcacagaattactatactcttaagtctagaatagaggttggccagctttatctataaatggccacgtagtaagtatcttagcctttgcaggcaacgtggtctctgttacaattattcaactctgccattgtagtgtgaaagcaagatgtaaataaatgagcctggatgtattctaatacaactttatttatagacactgaaatttgaacttcatataattttcatgtgtcactcaacattattcttctttggattaaaaaaaatcaacaattaaaaaatttaaaaaccatcttggctcatggaccagaccaaaacaagcagaaggccagatttggtccctgagtggtagcttgctggccctgggtgtggaagatacctcaaactggttaacttgtccatttctgtctccaaataagttcatgcctaaatcatcccaggtcaaaagactgctactatgcatttaaagacagggaaatatcacagcccttcttaaaagaccattctgatgtctcatagccccagttacgaaaaatgaaaagtaatgtgaatatgctttaaaaacctctagagtgctaagtattcttactactattgttattattctattattataagtcctttcttatggctaacctaatgtactcaggcacaccaatttatttggttcttttacttagcagggacacagagcagatacttcccattctcagaatggtatctgaatacagctctactacctttgggctaaaagccattctaattcctttagcttttactgattcttattttctaaatgattcatcatctgtgtggttcttacttttccccaggtttttctagaagaaccagcacaataccataatactactgatagatatgagcatacttaatgctatttgatgatgattaaaaaaaaacctttaggagttggcagttcaggtggttgtccagtgcttttcattctgtttagctgcttcctgtgacagcggcatactaaacatgggtgggtttgggacatttgcatatattctgggaacagacaatgacacatgtgtcagatcacaaggtctgaatcttttgtgatgtgtacagccaggatgctgattccaacagcaaaacccagctccctggcccatctctttcctgccccgccttctccctttgagtcctactgtctagctcctgacctgggctgcccctgcttagctgacagtatcagacaagatcacagccgtaggcagtacagctgctggcagaacctggtggccccctctgcagctgctgtttcttgtgtctgcgaagtgtctggcttgtcagccacatcccctccctggagcagtctttgttaaccaattccacctcggcccactgaacggaagatgaaatgcctagagctcctccaaaaccaacaaaggcagcagccattaccaagtccccattcgaatcccttccccaaggtgactcagagctggcttgctgggcatttttaacccacagaggggagagctgaagcttgggatgggagatggcaggtgcagggagagccgtctcctctcccaattcctccccactccatcctacaccctgtcctgctacagtaactggtggaaatccctgatcaccaactccctacatcatatctgaggcattagtcgggctatagcagagtcaacaaggccctcgggaggaatcttcaattacctcttcctagtgctggatcaagctagggtcaggaggaaggaatagttcatactaaatgctcttgactcagctgatgggcattctgggaggtgggagctgcactcttttctagggttccctggcaacccatgtgctggctttcagtccttctttgtagctagtcctgaccattcatttcccggtcattttttatcctgctgatgcccttgtctcctctcacccttctccttcccaaacttacagcccaggtctaagcagaaaaaaagaagacagggaggccacgaacacaggggtgagaaattgatgcagaatgagcagtctatttgttggtatctagaaaaagccattaagaaaataagcacttaaatgattttcaatctgcccatggaagccatccatcttcatactgggaggaaaaggcccattctccaatcccggttttgactgactggtttccaattctctaagcatttcccataggagcctctcacctatctcccataatcacaggcctttgcatttccaggcagtgttttacatttatttccgatttgctcataatggtcaaaaatctctctccaatccaaggcatttctccagcagcgcacggtttccctcaggccaaatagctcagctgtgatccacggaaaatgagaatttcccaaacacatcttcggactaggggagggtctggcatcacacattcagatggaaaatttcccactgttatatcaatatctgggctaagaaagaaatgccacaggggcagagagctggagcaaaatgattacaatcggcacaattacattcaccggcagaatcagctcgctgattactcccagggatggggagctcccgcttcatccaccacaggatggcttgggaattagaacatcactcagcatttcataattcaacagatatgcccgttgtcttggcatgagttcatttttcccacatagtacatccctgtaagaggagtcatttcaaggaaagaaggaaagaaggaggaaagaaaggaggaagaaacaatggaaaaagggaaaggaaatctcagagtatatgagaggccaaagctggtatattgcaggcagagattagaatatgctgctctggaatttccaggtcagggatttcacattacatctgcttaggtgtggtttaagccaggtctgtcccagaatccctcccagccaggaccccattgggtaaaaaggactcaaggaaatacacctgagtgacttcatacttatttgttgagtaagaagtttactagggccgggcacagtggctcatcttataatcctagcactttgggagatcaagacagaaggatcgcttgaggccgggagtttgagataggcctgggcaacatactgtgtgactcttgtgtctacaaaacacaaaaaattcgccaagtgtggtggctcacgcctgtagtctgtagtcccaaatatttgggaggccaaggcaggaggattgcttgaggccaggagtttgagataggcctctgcaacacagcgagacccctatttctatacacacaaaaaattagccaagtgtggtggcatgtgcctgtagccctagaaacttggagggctgaggcaggaggagctcgcttgcggctgcagtgagctgtgaacgtgccactgcaccccagcctgggtgatagagtgagaccccatctccattaaaaaaaaaaaagaaaaagaaaaaaaagtttggccaggtgcagtggcccctgcctgtaatctcagcactttgtgaggctgaggtgggcagatcatgaggtcaggagttcgaaaccagcctggccaacaaggctcaatacaaaaatgagccgggtgtggtggtgagcgcctgtaatctcagctactccagaggctgaggcaggagaattgcttacacccgggggcagaggttgcagtgacctgagatcgcaccactgcactccagcctggatgacagagcaagactctgtcttgggaaaaaaaaaaagtttactaggtaagttttcattacctctgaaccaatctgaagtccttttgggggccacagaaaaaagacagtcagctgagagcagggatttccactgcatctttcctctgttgagcttcgaagaggcagagctctcgttgctatctcgctggtggtgaatgctgggtaggcgggggccatggcaaatggattgggcacgctgcgcggctctgtgtactgacacccgccccagggcccacggtgtccctaccccctcccaatcttctctttaatccccccaaccagataatgtgggatttggaagcatgtaatatccatgagactccattataggctattacgagctttacacccactacctgggggatgtaccaggccgctgctgggcagtgcagcagctgcaatggagaaggaccacgggaacagtcccaaaggccagagtgactcttccattgtttctatccgtttccccccaaaagggagctctggtctcttgtgacagagaggcaggaagcatgaaagagaaacagctttcactcccttagggagtaaaagcatagagggaggtacagggagaaacaaaatcacagtcactgagtgtattggtggagccctaggagaccatctatcggtgtttctgcatgagaacaccactggaatttggggtggaatcttctcgagcattgcaggtgtagcatcccgggcccctgcccactaaatgtgagaggcagcaccaggcattgtgccaactacaaaaatggatcatgccattttcagttgtccctgggtgggcgggtgagtgggcggtaccaccctggtgtggaaccatcagttgttcaacaggcacgttacagaggaggaatctgggcccagagaggtgagtgacctaatcaaggtcatgggcaaggtgaagccaggactagagacagagccagatctctcagtttaggaccctttccacaaaacaggcagcctctgaggaatgagagacagagacagacacacaggaagggacaaacatatatgacaagaaagaaaaagagggaagcggggagggcaggggagaatacagaacagagagatcaaaatagtgaatgggatcaggggacaggaggaagggaagaaatttcatcaaactgactgaacttccaccacttccaagccatgggacatgaaagaggacttaggatctctgccctcaagggcaggatgggtcctgagaaggggcatagaggacaagaaaaccaatagtgagagcccaagggcagacttgggaatgggctggaaatcagcatgagaatactgggattctaccgactgaatctagatggcttcacctcttctctgaacatgaggccatgactcctctcagggcctacacctggacccgagatccctcctgaaggagagcaaatggcccagggctttgctttgttttgctttgagacaggggcttgctctctcatccaggctggagtgcagtggtgcaatcatggctcactgcaaccctgacctccctggctaaagtgatcctctcacctcagcctcccaaatagctgggatcacaggcatgtgacaccatgcttggctactttttaaaaattttttactttttgcagagacagggtctcatgatattgcccaggctgctagtgaacaaattagtggcctcaagtcatcctcctgcctcagcctcctgaagtgctgggattacaggcgtgagtcgtcacatcaggcccaggattttgaaacacaccttcacctaggtgacttattttttaacaggcagactggattactgctgctgggaatgaaagagaatcaagaattaaagacaatccaggccaatctgtcgaggcagagggtagaacaccagtgtctttcatctgaggaactgaagcaacgtttcccaaatattcggttgcccaggggagaagtggggctcttggacaattccggaggagttatctatgcatataaggccctcagagccctgcaggtaatgtcgtatagcactggggcgatgcaggtgctccctgctctgggtgtcctgggtcccaagcagccagcccaagacccccctctggatgaggcctttgccctgcaggctttagtcttgacttttccagcagggcagtgaaatatatgcggctggccttgtcaatacaggacaggtctagattctgcactcttttctgccccaggcaaaaggctttctgtccaccagggtgaaccacatacagaactaattcacctttccctgctcctgccctttcaggatgcaattcgacagctaggaggcatagtgcgtgacggagagaaggtggtggagataaacccagggctactggtcacggtgaaaaccacctccaggagctaccaagctaagagcttggtcatcacagcaggtccttggaccaaccagctcctccgtcccctgggcattgagatgcctctccaggtaagaggagctggaagcccgagagttggtgctcaagagaagccttggaaccagatggagtcaaatttgagtcctggatctgcctcttgctagtggacaaccttgggcacattcattcacctcaccgagcctcagttttatcatctgtaatatgggggatgatagctacctcatagggctgttggagaattaaattattaggctggtgcaaaagtaattgcagttttaccgttcaaagtcatggcaaaaaccacaattacttttgcactaacctaatatatgctgtatataaagcctttaagaggccggatgtggtggctgacacctgtaattccagcactctggaagaccaaagcaggagaatttcttgagcccaggagttcaagaccagcctgggcaatatggcgagaccctgtttctacaaaaactaagaaaaattagccaggtgtagtggcgtgtgcttgtagtcccagctacttgggaggctgagcccaggaggctggcctgagcccaggaggttgaggctgcaatgagtcgtgattctaccactgcattccagtctgggtgacagagcaagaccctgtctcaataaaataaaataaaataaaataaaaataaagcccttaggacataacctggcttatagtaagcactcaataaacctgaggtcttattaattcccgaaaagagacagaaatatggctgggggctgggtgtagttatgggagaaaactaagaatgggagaagagacagaggctcagagatgtttgtgcatcataacacatgtaacaggtaaacaacatgagaagtgggagagacaaacatggatgagttcaactgggtgtccaggcttgtgttagagggccgcaggggcccagagaaactgctttcattgctgtagagttccatggcttttcttcatttcccacttcctctccctgcctcaagaccctgcggatcaacgtgtgttactggcgagagatggttcctgggagctatggtgtgtcccaggcctttccgtgcttcctgtggctgggcttgtgtccccaccacatctacggactgcccacaggagagtacccagggctgatgaaggtgagcggaaagaccgagataaggcaggtagatgccagtgcagattaggggaagctgctctaactttcccctccatagatgcccttgggtctcggggccagcagcaggagcctgcttcactcatggcgatttgcaaggaaagaccctcagctgccctgaggcccagcaaaaggagcccttcctttgcaaacatagggtggttgcagggaccaacagctaagcagcctcaggtgacagcccacagcacctgccaggagtggggaaggctggaatgatggatggggctgtcctgtgtacacgcctgcccttcggctgtgggtgtgtgtggaaggccagccctcaccactcatgccactctgattgggagccaggtcagctatcaccacggcaaccacgcagaccctgaggagcgggactgccccacagcacgcacagacatcggagacgtccagatcctgagcagctttgtcagagatcacttacctgatctgaagcccgagcctgctgtcattgagagctgcatgtacacggtaaggggtctgggcagccttgctgggccccctcaccactctacagaagggaagaaggagacagaccttgcactggccaggcccgattgtttgacccctgacatagtgtgtgactttaaacaaacgggctcatttctgtgggtaggttcacctctaccagggagggtcctgttcgaaattattcctattcttcttcattaggaaactaggttatgcctggcagtcggtccttcactctgattcccagaagagctctaaaagattttctggcaagctcctccagttgagcaggccttagggacaaagagaagagacagatgtcaccacggcctaaggcatcttggctaaagttagtttacaaagattaactgaacacctactgtgttcgtagctctgtgcgagaagaaaggcagccggacaaatgaaaaagactggcacacccagaggggcacgggcatgcggaaagcatccttgtgcctcattccatcctttctggaaagaaatccagcccatccccttccagttagagcctgcagttctttctcttccctcgagcctcaaagaacacaaggtgtgactgtttctttctagaatacccctgatgagcagttcattctcgatcgccacccaaagtatgacaacattgtcattggtgctggattctctggtgagtctgagctggggggaatggggtgccttaaagctgacctacctcagtgccaggtgaaatggtattttccacactcttagctgcccagataggtgtgaagcctggacattgtaggtataaggaggctgggcagtcagaaaaggggtattcatggtgggaggccacttctggctttgggatgtgaccaggaggacagtcagccctgtctgggtaagtaggggatgtccagagagctcaacctctgtctgtgaagctgcctgagagtctgctcttcccttcctagggcacgggttcaagctggcccctgtggtggggaagatcctgtatgaattaagcatgaaattaacaccatcttatgacttggcaccttttcgaatcagccgtttcccaagcctgggcaaagcccacctttgacctctggccagaagcctcccttctgtgcacaggagccagtttcacagatggagaagatgtctcagatgaagggagtgtccctgagatatcatccttttcttctgcctcgcctgaatcccccataaacaccagatgattgagtctaccttctttccttggcccgctccctttttcttctgcctcacttgaatcccccgtaaacaccagacgattgagtctaccttcttttcttggccacctccccattcacaactactttctcgctcccagaaggttgatcagatattctacaatcacagagtagcaaggacgtttgagatgggtatatcagtaagaagagggcacaagaactggctctggagaccaaagcagttgttaaaaattctctttgctgggggccgggtgtggtggctcacacctgtaatctcggcactttggggggctgagacaggcggatcacctgaggccaggaattcaagaccagcctggccaacatggtgaaaccctatctccactaaaaatacaaaattagctgggtgtggtggcgcatgcctgtaatcccagctacttgggagactgaggcaagagaatcacttgaacccgggaggtggaggtggcagtgagccgagattgcgccattgcactccagcctgggcaaaaagagtgagactctgtctcaaaaaaaaaacaaaacaaaaaaaacctctttgctggtatatttgaagagcttgggatggatttgactaaatctgccccgaggagggtgaacaaggtgatctcagagatcactactgctcttggagttccttctcctaaagctaaggccagcctccatcacaaatgcccataaaatctggctcgtctttgatgaacaataaatatttgttgaacaaataaataactgccctgcattaagtctgtagcgggctttcttttctgtgtgacctcatttcttccaggctctaattgtctaaattagcaccacagaatccattaacccaggaacccttggagtctttatcccctcaatgcgctgcaccccctttctctggattctttgtctcctcctcaccccctctctggttgtgtgaagatgctcagctccccagtctctcattaaggtgtattgtcaggtccttatgaagatggagctgttataccagaaagaaagagagagacacactcgcttagaaaccctgttcaatgtttgaatgttaaatgtgccattttattatcattaggattgctcccacttaatgaaacagcattagcaccgagttggctggcctccttgcactaattgctttggaagggaacaggcttataaccaccccagggtgggtggaggggtgaggggtggtaacagggactcgagcaagtctggatgcactcagatgaaacccacctggaggatctccacatcgggccagttcaaccccagaacaggagctaaaatgctctagagagaaaaactgggactgggagtggcagatgtgttagggggagtcacagagtggggaggagcaggcagtgagaatgacagtacaaatatccccaaaggaaatacaacacagaggaaatggctcttcaactgcctgagtccttaaggtcctaggcacatgtattagcactgattctccagtgagttataaaagccagccaaggccgggcgccatggctcatgcctgtcatcccaacactttgggaggctgagcggggcagatcacctgaggtcagcaggtcgagaccagcctggccaatgtggcgaaaccccatctctactaaaaatacaaaaattagtcgggcgtggtggcgggaacctgtagtcccagctactcaggaggctgaggcaggagaattacttgaacctgggaggcagaggttgcagtgagccgagattgcaccactgtactccagcctaggtgacagagcaagattcagtctcaaaaaaaaaaaaaaaaagccagccaagcctgtcaaccccatgccaagtctgctttttgtgtgatctcagatggttccctgaacctcagcctctgtaaaatgggagtattatatctgtaaatgggaataataatgccaaccagctccacaggggtgtctgaggatcaaataagatcattcattcatgcatttgttcaaaacacaaatactgagtgagcctctattatgtgtcaggcactatgtgaggcaccgtagatacatcagtgaacaaaacagataaaaatccctgttctaaaacagcatggttgttcctcaaaaaattaaaaatagaattaccatatgatccagcagttacacttctggtatatgcccaaaagaactgaaaacaggatctcaaagagttatttatacacccctgtttagagcagcattattcacgatggccaagaggtagaaacaaccgaggcatccatggatggatgaatggataaacaatatgtggtatgtacatacaatgtaatgttattcagccttagaaataaacggaattctggctgggcatggtggctcacacctgtagtcccagcactttgggaggccgagggcaggtgggtcacttgagtccaggagttggagaccagcttggccatcatggcaaaaccctgtctctactaaaaatacaaaaattaggcagggtgcagtggctcacgcctgtaatcccagcactttgggaggccgaggcaggtggatcaggaggtcaagagatcgagaccatcctagccaacatggtgaaaccctgtctctactaaaagtacaaaaattagccaggtgtggtggtgtgtgcctgtggtcccagctactcgggaggctgaggcaggagaattcttgaacccaggaggcagaggttgcagtgagccaagatcatgccactgcactccagcctggcaacagagcgagatcctatctcaaaaaaaaaaaaaaaaaaaattagccaggtgtggtggcacaagcctgtaattccagctactcgggagactgaggcataagaatcaattgaacctgggaggtggaggttgcagtgagctgagcagcagagcacgaccctgtctaaaataaataaataaaaataaataaataaataaataaataaagggaattctgatacatgccaccacatggatgaaacttgaggacattatgctaagtgaaataagccagtcacaaaaacacaagtggtattatttcacttcatacatatgaggtatctagggtagtctgagtcatagagacagaaagtaaatagtggttgccaggatctgggaggaggaagaaatggggatttgtttaatgggtacaggttttcagttctgcaggatgaaaggagttctgtagattggctgcacaacagtgcgaatgtacttaatgccacttagctgtagacttacaagtggttaagatagtcaatttcgttacgtgtttttgacgacaatttttaaaaaaatctcattcttttttttttgagacacagtctcactctgttgcccaggctggagtgcagtggtgcgatctcagctcgctgcaacctccacctcctggattcaagtgattctcctgtctcagcctcctgagtagctgggattacaggcatgtgccaccacgcctggctaattttttttttttttttttttttttttagtagagacggggtttccctatgttggccaggctggtcttgaactcctggcctcaagtgatccacctgccttggcctcccaaagtgctgggattataggcgtgagccaccgcgcctggcctaaaaaaaaatctcattcttacaaagcttacagtccagtgagaaggagacacataggcaattcacgtaagtaattataaattagaaggtgataagtgctttggggacaaaacagaggcaggtgatgaggaggtgacagggagtgctgggggagggtctgacctttcaggtgggtggtcagaggaggactcacagaggagggcctttgagcagacttgaaggagaaggagtgagccatgcaggccttcggatgcaggtgaaagaatgtgatgagttgtaaagcaaggtattgtgttatcactggtggggacagacaaatgagacacagagaagggccagaataagatcccaccagctcccaagccgagaaagttgggaagctaagatgctcagaatgccccctctcaccccacagctgcctgcagttccctctggcttctctcagtgccaccccttcccccagccagctgcagctccccttccaaaatatccagccttattcagcttgttggtgacagctaaaggatggaccagtgtctcccaggggctgagaaaggacgagtgggggctgctcccaagccctgcctcagctggcggaggcctctctagatgagcacaggaaagagtgggaggaggcaggggggtgagtgagggaggatgggtgtggggggatggatcgggccagcgaagaaaggagacagacaagaagcaggaaagaagagactggcaatgtgcagaccacgaaggcaggtcaggacctccagggatgccacgcacccctaaagccaaaagaaatgggcccagagtgcccaagtgggaggaaaccagccattcttaggtgggatggggtgggatagtagaggagatgttgggaatagtctctgggcctagaggaaagcaaaagtcattgtagaaggggtcctaggataacttgagggtttcagttatatcgaaggattttccaaagcagatcaaccagtattctctctctgcttcccttctgcctgagcgtggccaggcatcccctttcaggcaggccgtacatatcttcaggatggaagaaaatcaaaatcaatcgggcaggcaagaagagacctctggaagggcagctggggtctgcacaggctgcaggggagagataagggcaacgaagagaaagaggctggcctggttggcaagcagactgaggaaagcagaggcaggctgaaaatagattgggggcgggaggaaagaaagccaggccaggaaagaagggagagcagaggcaatcgatgccttcgtgactctgacccaatttttcatttcagcctcaccaaaagatgaggagatggtggggaaatcgggaaagactggcaaagagggaggagagtcagggcaaagtaatttgagttctaagacccaggcgatcgtggggtaccagtcagggatcgtggtggggagaggaggaggtgtatactatcctcagtaccagtttggaccccagcagagtttggcatcccagaatgggtttaacagcttaaggaatgtgagtgtacccaggaaggagggtcaactatctagaaaggtcaaaggagaaaacatggccgagtcggtctggagacagtcggctacaaagtaactccaagcctgcattttcttctcagaagagtgatgaaagagaatttggttttttaagtggtgggctgttagagcagcaagagggattaaagttagacttcaggaaatccatcccattaggtagattcatgagatactaaaacatgtagatgagcatacttatattctttccttggaaatcttaaaaaattagaagctctgctatttgggcctgtagaggctcgtctgaaggccagggcctcccctcaaaacttctggacgactgctggctagaaaggggggtctaagatttttattaccctgggggtagggtctgaaataaatatctgggcctaaggcagggctaatgcaggcacctgggttagggagaatgggggaggcccaaggtgggctggatccgtcagccctgaaggagccacagagacaaggggtgggattctaacaggcaggacctatgacatttacataactttgaataatgaataagcccagctctggggttcctagttagcactgctcatctgcatctttattcagctttataaatgattcagctcctaccccttcccccagcccctgcccagcctgcccccaagcatcggggtagttgattgctcattattttagactagatttgtttcaccaacattcagtgagacatggaatgggggtggcatgggagagaggaacaagtccaaaaggcaagtggagtgaaggggtcgggggctggagaatggaaacagcagccgtgggaagggaggctcacagctgcgagcagaggcacagagctaaggacgtgggcatcactctccaaaatgctcctggggccagcatcttcaggagagaaaagtttcttagattccccgacatgtgccgggttcaagtcccactcgaatccccgggctcccttacaactgctgccaaggcccccagcaggccccgtgctcagctccagcacagcactgaggcgttggagcagtcaagtgagtacagcccccagggaagttctcactttttcctgaggcaggaattttgctattttcacgcaaaaaaaaaaaaatctgctacgcttgtaaggcaggaacacgcaccaggtatattaggggagaaagaaataggaacagatgtacatggtatgagaatctgtagggaaagggaatgctgtatccacagggagttagcacccaccttgaaagaggaacctggagaagatgggcagccctcacctgatcggagcggctctgggagctgcctgatcagctggtcagaaacggggagaagtatttaatggcatgaacacggaagagttggccggaagctggtagggggaaaggcagagcatttctcaaccctggctgcacattataaccacctggggagctttaaaaaagatgatgcttgggacccacctaagaccatttaaattagaatcgccaagggagaaggccctaggcaccatattttttaaaaagctcttcaattttatttggatcctagtttaaacagaccaattttaaaatatatattataaaatacataacaaaactatataataaaatcagggaagtttaaacattgactggatgttttgtgttaaggaattattgatcattttttaggtgtgataagagtattgtgattatattttttaaagagtcattttctggctgggtgtgatgtcgcatatctgtaatcccagtgctttgtgtggccaaggtgggaggatcacttgaggccaggcgtttgaggctgcagtgagctatgatcatgccattgccctccagccaggacaaaagagcaagatcttgtctctatttaaaaaaaagaaaaaagttggctaggtgcagtggctcatgcctgtaatcccagcactttgggaggctgaggggagcagatcacgaggtcaagagatggagactatcatggccaacatggtgagaccccgtcactattaaaaaatacaaagaattagctgggcatggtggcacacgcctatagtcccagatacttaggaggctgaggcaggaggctcacttgaacccgggaggcagaggttgcagtgagctgagatcatgccactgcactccagcctggcgacagagcgagactccatctaaaaaaaaaaagtcattttcctttcctttcctttccttttcttttcttcttttcttttcttttttcttttcgagacatcctctcactctgttgcccaggctgaagtgctgaagtgcaatggtgctatcacaggtcactgcagccttgacctcccaggctcaagtgatccttctacctcaacctagctaattatttttattttttgtagagatggggtctccctatgttgcccaggctggtctcaaactcctgggctcaagtgatctgcttgccttggtcttccaaactgttgggattatagatgtaagtcaccgtgcctggcctcattttcttttctttgaggaatactaaactatttcctggtgaaatgacatcatgtctgtcagcttcaaaataatacagtgaagagaatggggaagtgggcagggttgccaacaaagcaagattccctgttgataactgttttaattattcttattttaaattaaattaaggccaggtgcggtgggctcaagcctgtaaccccagcacttcgggaggccgaggcgggtggatcgcctgcagtcaggagttcgagaccagcctggccaacatggtgaaaccccgtctcaactaaaaaaaatacaaaaattagctgggcgtggtggcgtgtgcttgtaatcccagctactcaggaggctgaggcaggagaatcacttgaacctgggaggcggaggctgcagagagctgagattgtgccactgtgctccagcctgggcaacagaatgagactccgtctcaaaaaaaaaaatttaaattatatatattttttaagatacaggagtttcactatgtttcccaggctgaatttgagctcctgggctcaaggaatcctcccatctcagcatcctgaggtgtgataactgttgaagctgcttgatgggtaaacaggtgtattagtccagtctcacactgctatgaagaaatatccgagactgggtaatttataaagaaaggtttaattgactcagttctgcatgactgggtaaggcctcaggaaacttacgatcatgatggaaggcatctcttcacagggctgcaggagagcgaatgagtgcagagtgaagagtggaaaagccccttacaaaaccatcagatctcttgagaactcactcactatcacaagaacagcatgggggtaactgcacccatgattcaattacctcccaccaggtccctcccacaacacaaggggattatgggaactacaattcaagatgagatttgggtggggacacagccaaaccatatcaacaggttcattcattatactattattttaaaactttttgtatataaaccaaaacagccaggggtgagaacctcagagccagccacttagaaggacaagtgccacctcggcaactctgcgggcagaaccagcttggaggagaacaggtttgcaggaccctaaataagaggggagggctcagtctccaatgtcctgggccctgggcagcacagagccacttggggaaagaataactggcacttagagacgcaacttggggtttggaaggctctgcaagctgcttcactgtaagcccacacagcctctggagtccccatgtttcatgtactaggcctggaggccagactgagggtgccggctgactgaggcaaccaatgcaaacaatcagcttcttctctgtctccctgccctctcctgaccagcttcacagggattcagacccccatctcagttggcatcccccactgcccatcaccactgcttccctgcactgtcactcctcccatgggctcatctgctagtgccagggaacgttagcccagctgacttcttcggggatcggggaaggctgaacgcaaatctgtacaactgtgggcacccagacacccatcgacagagggagcaggagaagaccccagtggttgctgccagaactgtgtgagctgctgagagattccccggtagattgaccctacttgcacatcactccttcaatgaacaaatcaaatgaatcctaaatgctcaggtatctaccatcctggactagttgagtctcctcagccttggcccatggaccaacacaggaatgcccatgttctccacgtgctcctgagaaataatttcctgcaccactgaagtggatgcccccaccctgccgcacatctcagccctgtcctccacccatttccgctggtggcactactagctccggcctcctgctcagtttggggctctatctgtcttctgtgctccattaccttcccccatggcctctaggggctggggaggggagagttggaggggggctgcttaagagatttttggaatcagtgcctgcgcatcacccgctgccatgagttatttcagcgctgatgtttgtctcgagctgattattccagcccgagaacaggtggagcagcctgcggtggtttattcgtcagccaaggccatctgttcccaacaagctgagatttgtagctgatttctgctggggagcaaggagtaggggtggggagggagagggagatcacacccacaccccaggggacttgctcctcccagacctgccaggatgcctcaacccctgggcttcccttttactagggatcccacattttccaatttctcagagaaactcactggtcactcaagtcagcaacaatacttccctaaggggctacaccttcttagatggaaccatgtattagaagcacaaatctaccagccaggcacaaagtctggccactgagccatgtccccaccttgcagatcttaaaaaaaaaaaaaaaaaaaaagtatatcactatgacacaaatgtcctaaatgaccttctcaactcttggctcctcctcatcccaaccccactgccagtccctttaacaaaaacagcctcacctaaaccgatcacctgcagggctctcagctgcatgggagggcttgatctagatgctcttgtctcatctgcgctgctcgcctcccctaaataccctgttcatgttccaccctccaatctgttcctcttccagcttccctctcagccatgccgagagaagcctgctgctttaagaatggctttccctgagcaagggatctaagcagtttctaagcagctttgccacacggtttaccccctcccgcccacccgcctgctatgatttctgtatatgaaatgttgggaaagaagtgattcttataatcatgctaatatgacaatttggggccttctttggtgttgctacacacatctgtactgacttttaaaaattgtatgaaaacttggtattgaaagcacagccacttcatctataaccccacatccccaggtaaaactacttatagttttcagaggtcccttctaatatttatttattgatctgtgttttcccttctacttttgtcatgtctatatgtaaccttaggaacccattaacagagctgtaagactgcctcactttctagttggttctctaggcttattttgtcggttcctgggagcagaagctcctttctactattaaaacctgcccagtggctgagtatgtttccaccagaaacagtagctcccacagatgttctccggaacccacaaaggcaggccatgagacctgtgcttccagggcagaaccttccagggagtgcactcactagggtcactcttccttggacagtagtcccccagcagtcctcaagcaagggtgccaacctgcagttgatgccaggccccagggttaagatgagccatgagacctctttcatcacatacaattttatatttgcctggctgcctgtcactcaccggtctttcaaagtgctaatgtttccgaagctattggctatatcttccccatgcagagatttttttaaactcctttttttctttttgagacagagtctcacccgtcgcccaggctggagtgcaatggcatgatctcgtctcactgcaaactccaccttcaagggattctcctgcctcagcctcccgagtagctgggattacatgttcccgccaacacgcccagctaatttttttttttttttttgagacggagtcttgctctgtcgcccaggctggagtgcagtggctcggatctctgctcactgcaagctccgcctcctgggttcatgccattctcctgcctcagcctcccgagtagctgggactacaggcacccgccaccatgcccggctaattttttgtatttttttagtagagatggggtttcatcgtgttagccaggatggtcttgatctcctgacctcgtgatccacccgcctcagcctcccaaagtgctgggattacaggcgtgagccaccgtgcccggcctaatttttgtatttttagtagagagggggtttcaccatcttggccaggctggtctcgaactcctgactccaggtgatccacccacctcagccttaactccttttttttttaaatttccattttcaaattccctagtgtcctctctttcccaaatccatttgctgcttttcctaatctagtcagatcatagatgtggcacaaaacatataaaaatttcttaaaatgtggaaactctttgactcttaagccacttcaaatataatttggctggatagtgtcaaaacgtaatatcctttttgaattttcttttcttctaaaactgtcatagctgacttttgatatctacagcaaattctatctgcacatataagtattccactgggggatttatgtgactgacttcagtcgcaaagcacacactctttttggaatctcccttatgtttatgacccatctctggggctcacgctacagaagactcaatttctctgtacaattccttctaaacacatccagtatccttgttaactccaaaatggctactgctctggaaatctttcctcccagatcaaatagcagggaatggtctggattgttgttgtactgtaatgaaattagactgaagtgaatatagcttaaaatatgcattctgagcgatgtggaactgttattcatattgctggcacagtgggagtgaagtgaaaatgtgataatatatgggggatgctctgaaaattgtgaagcgcgacgcaaatgtgaagtagatattttccccccaaattgccaagaagcgtttcctttctgaggccaggacttggcgaatgccaggcacacgcgatttgagatgaggaccatggtagtgattctttgctttcttgcctctcactgcatcctctgccaaggccagaatagttaggagacgcctggccagctgctggaagcaagttgaggactctgcttagaaagatgacatcacccctcagcctcagttttctttccaggatgacgtcttcacagagttgtgatggaggtgaaatgagattttgtagggcaaagtgcttaagcgctggggtcatcatagtaagtgctcaacaaatgggaactgttgttggtcctttttttttttttttgagatgaagtctctctcttgtcccctaggccagagtgcaatgacacgatcttggctcactgcaacctctgcctcccgggttcaagcgattctcctgcctcagccccccaagtagctgggattacaggtgcctgccaccacgcacggctaatttttgtattgtttttagttgagatggggtttcaccatgttggccaggctggtcttgaactcctgacctcaggtgatccaccctcctcggcctcccaaaagtactgggattacaggcgtaagccaccgcacccggccaattattgctcttattaccctcctctcactactgacagggtaggaaggggcctgtcagtcccagtcactgactctgggcctcagctcaggccagagttccaagggcccttaaaagggcgggaaacattatttccgggttgctcggagagtagacctgtcctaatgccgctgtaatcattaaaagggcaacacagatgggctgcccatcggcggcttgaaaacccatttcttttaaggggagtggcttctgggaagtgcgtaaagaacctccaggcaggggcgggaccagagggccacgtgcgccaatgaaaagtggatatgcaaatatatatatgaatatgctaacgagctctcggtttcccagtgaatggtagggcacaagcctggactggcagagcgggctagggaagaagaggaaatgagaggacctcgaggttcaaccgagtgtctgaatggaaactaactcccgacagaccatgcacaacgtttcttccacagcacccggatctcgaagccccactgggcatcaactgtcagtccctcactaggggggatgaagggggagggcgtgggagattcttttggctgtggtaaggagctctgaatttagaagccagaaggttcttgccagcaatactaccttgtttcacagatggggaaactgaggcctgacaggttaagccccttctccaaggtcgcagtgctagacgcagaagaactcagtttggcaggttttgtctatttttgctttgttttcattactgcacgggggcaccactctggaggtgaaaaggcagcagcctgaaaggcggcagagcttggtacattaccgaacgtgtcggactgcccaccaggctggaggttttagaaaatatgtcctaggagaagatggaaggagtcagggtggccgccagtagaagcaggcaaggacaaattatcatagacttgtctggaatgtgttgctatataaaaggtgacgaagtgttccagcttcccagagaaccggtgcagtggaaatgaacggggaacagaagggattagggttagatttaaggcagtactttctcccagggatgataatggggcccttcattcagtgaccaaggcaggctagggactcatccccctcccacttccgaggcctttgggaatccatttccctccagtcccacacggccagcttggaggtcaggaatgaattagaagactttgaaaagtccccactattcaggtaggcgatcctttccctggatgggcctcctgggctctttgctgagggtaaggacagcagccgctctggctccagggccctggggaagaaacagcagtcatggcatctcttgcaacacgctccctgccaaattgattcaaattggcttggatatgaacatatgattaaaggagcggcgcgattcatttatcaggagagattaaagagcggcatctgcgcagcctagctgggggacaattaaggagcaaatcgctaagtgtctttgccaccaggcaagtgggtggaggatggggcaaggacaactgggataatctgccaaggagacacaaagacaaaagaagaccatttaggggtcactgcctgccactttattttctgggcacagactgggcaccatggggagtcccacaggggcactggttcccgcccatgcttattcaggagtcagagcaatcccggggatctgcagttatagaggaggatctagcaggctggctttgagcctggcaaagggccagatttgccttctgcaacatcttagggaccagaggtaccatgagtgtacaggtaaggtcaacagcagagccttcaaggtacacccaaaataaagatgggctttggtggccctaaaggctcctggactcctctggggccaagggaattgtctccttctcaactgaaacttggagaagcactggtcatgtgacaatgcacagccagcctgtggcatgttctaccagcacctctctttccctgccccaggacctttacttaaactcttcttcttctcaatatgcctttcccagcaactgtacctgtggaagtgctattttcaagccctggtcaaaatagcagctccttttagaggctttcccaatcctccccgccaaagagagcatctccctccatagtatgtccaaagcaacctcttcatccttgttaggtcttatgtaattatttccacatgggtctgctccagccctcgtccgcaaaaccctggaggatggatactatgatgtgttcctctctacccactctaagcttatgcatactagcaggtgcagcatgtattttgtgtctaccttcctccactttatgaaggaagggaccttatccatcaccagcacccagaatggggcctaggcacagcaggcagtcatgaaatatttctcaactgttaagcaaatgaatatgttttctgacttgaacaaagctttttaccccaggccgggttattggaggttgatgttggagtttccagttaaccagaggcttgactcagtatgagtgaacagatttgggaattcatctaaaggtggcagggagtttgtcacactagtccctagtagaaacagaaaatgtaccacgctatgtgaaaacaggaataaaagatgagagtgacagaactgaacataagctagcagcctttttttttttttttttttttttgtaaaaaaaagtaacttaggccaggcacagtggctcatgcctataatcctagcactttgggaggcgaggcaggcagatcacttgaggtcagaagttcgagaccagcctgctcaacatggcgaaaccccgtctctattaaaaatacaaaaattagccaggcgtggtggtacacgtctgttaagtcccagctactcggagggtttaggcaggagaatcgcttgaacctcgggaggtagaggttgcagtgagttgagatcatgccactgcattccagcttgggcgacatagcaagactctgtctccaaaagacaagtaacttcccttttactattgtttctatcctcttctctgttctatcgtggggcaatggagggggcagtctctgttcgagacagatccacttcacactctgtcccattcattttgggggagacttttctcccttcttcccttttggactctttctggatggctgacattatcagagcctcggcacttgggctgtttgctattttttcccacccatctgtccaaactactttattcattcagggattataactggccacactacagaatgagaaggtagaaggtagaagaggaggaggggtgtcatttgtttcttgcctttctgcatgagctgcctcttagctgtcaatgaaggaacaaagcatggagtagggcatgaagacagggaccgagcagggcagagacagcactcccaacctattcacattgccctgtgggcccgagctagttctgccaagttttgatcaaaaagtcacctttgaaatggctaaaattaagcttttaaaaaatgttctaatgagaagggcttgaatccaaaaagaaagagaatgaaagaaagaaagagagagagagagggagagagggagggacggaaggaggaagagaagagaagagaagagaatctctgtaattggtgagatttaacaatcagagggacctcaacattcccttgtggaggctagggaggatgaggcttggagtctctgccacccttgctaacctgaatcacagtccctaggctcttcacataaaaggtggggcttgtgtcttccttggccaatcccctcattccactacctctgcctgccccaaaatgagctgcctaggctctttaagtggcactggtctgacactttggggagcaggccagagaccagggtgatgccctcacggtccccatcagaatcctgcctctgcccaccacccccaggaccaatccagactttgcctgagcctgaaggaacaggcaggaaaactggcgcagccaggaggaaaagggcctttatttccatacatcgggtaaacaggggagagcacagcccagtgagtacaaaccaattgcaggagagaaggggggcggcagatgggagcagcaccaggcactgcacttgggctcccaagtctggtggagttctcagggataacctttttagggtgggggctgggacctccagaccacatggtgttgtgtctgggataagtgtgtgggggcagggaggttggaagaatgacacgggctcaggacacagagtgaggactcatgtctaatgagcaccggccaaaacttccatcttcagtttttctgatcacaagtcctcaaccccaagccttccctctcaagttgagtttatggtccagaccacctggacagagcaggagggaggcagtgcttggatcagccctgaactgctgtagttggaatgggtttaccttaaataggtcattgcacataacacgctgagacaaagagggtggggtgggggctggaggtgcggatggtccacacacacacttgtctgcgtaggcttgctcaacccagcccagcagcaccggagagcccctccgcacctcattcttaagaacctggacccggctctcctcaccagcgtctccagctgcacagagaaaggactgctctctgaagggtgaagatggagatgacattcccgagtcgttcttgggagccccagctaccactacagccccctcccactctcagggatgcagctgtgatggagaggttgggtatttaaattaaaaagtagaaagacagcaggcaccaagaagagagagcccccaccccacacgagagggaaggcactgcttctcctcccccaatcctccccatggacccagcaacctagagtgtcccagtaggcaacctgtccaccgtccctgagcagggagctgagagggaggtcaacgtgctggctccatgcagtgccaggccacctgccactgcccacggtgacacagggtagaagccaagagtctggcattttgagacagaggagcaaaaagttctcttcagaaactcctctttcccccacctcttccacgtggagacatcagacacccatagcctggaaagtgcccctgacagaagaaggtcagggtgtttcccatgcagatcagcagtcgggtgggggagaccggtgccccaccacttcctgggagaggtgcccaggcagccacaggccctggggtgagagggctgccaaccactcccctgggctatgcgttagtctccgtcagcttggcctctgtgtcgctgtcactcagataactgtgggagtatcgcggtctggaggtgttgtcgagagggtcgtgctcatcatctgaccgatcaggggcaagggacttccagtagctggtggggctgcagggaccgaggaataaggttagggacaaatgacactcctaccattaagcacgcacgcctttggttctggaggcccacaaagctgcgtcagagcactccccaaaagccaaacattgttaagtaaaaaccttccttggcttacttagaagatactcaaaatgctaagaggaaggagactctggaagcttttaaagctccgaggaaagggatgctgagagcagtgagtctcggactcaagcgtgcataagaatctgatgcaggttcctgggcccttcctcttagaaaccttgaatcgctggcttttgggtacaacccagtaattctgcattttcagtccttccccagaaggctctgaagcaggcagtccgtgaaccacattggcttggagactggaggtctggtgagtacaacttgtctagggtaggggctctcttaggcgagtgattcctaaaaagattccttctgaggaggaggcgctttccctgtcaaatactcccagatctgaaccctttcccctaatgatggctccctgaggcctgtgagaattttcagctttgaccatgccatcatctactaacaagaaatggaggctcaggaaggagaggctgggaagacctgttttaggatggcccaaggggaaaagcccctttcttggtacaataacataactcagagtcttcatcaggcctctggctctggaggcctccagctatcccagatgtgaagaggcctcttccccctgatggagcaggatcacagcactgaacagggaagaggggacctcatctcacagctccattcaccttctcttttctttctcccaaagccttggggccacctttcccgtactcctcctgcctccactgcctccgtcagttcaagtgcactctcgtttcaacaccattggagaaaacacagcccagtgtggctcctctcctactgatgccccacactcggcgtggtccctggagctgcagccctgcctccagatcctagagttccaacttgggcaagcaggagttccatgttccctgctgcctataattctgacttaagctgaaaagggacctttgtttactagcccttttaaagttctatccccaaaccaaaataggaggagtcagcgttctgcggcaagaaccaccttcttagcttttcccaaggtggcagtgagagatgcagagggcaagatttggtcactgagtactcctatgtgtaagacacggcctaggcatgtgagataggctatcttactcttcacaataaccctatgaaatattacgaggaagccagtccaaagagatgaaaggatcttccccaaggccacacagccagtatgtaaacttgaatctgggactcttagacctcaaagactttggacgacttcaccccgccactcgattggttgacctgagattaaaaaaaaaaaaaaaaaaaaaggaccaaacctgaattctcctgctggcttgggcaagtgcccaggggttatgtaaagaaaggtcggtctctatccctgggggaaaggaagaggctgatagaatacatgttcaattatgcaaaatggttcaggaatggggcagtctggttaatagttatcgtatttctcatgaatgaattaccatttttaaaggaatcaggatagcacaaaacacatttaacacaaactagactgaacataaatgagtcttactttgataggccaaaggcacttagggactctgggggggtttctaggacaaaattataaagctcactgatgactatgcaatatagaaaaaaattggggttattttagctttggggttgtttgaattctaaattagtgggagcctggtttggttctcattctttacatagaatttctgggcactcagggctaggatctgccgttaggctaaggagtgcctggctttgtggaaagacagtggggttactttgtgagcagagcggggcgaggcagatgccagggctggaatccagatgcaaatgaggtgctgctggcgagctccaaggcactgtaaattgctgaatcagggcccctctggtcctttccattgcctcacctctttttaaggtgggggctccagtccccaagcccacattcctgtacctgctaggcagacacctggataaatgacagccgtgtttccatactgtttcatcaagacgctgggcagtggcaggagctgccggggaggtggtaaactccatgtctctctctgccttgggctgcggacccacgagattgcccttgcccgtagcttgggtgatctttagccattcttagtggcttccactgctccagccatcagggagtcaacagcaggccgctgccctcctctccagggcaagagtcagagctggcaatttgaacattttaaccaaattgtttaaaaaagccttcctcctcacaagccagcgtctcctgctcagcactgtcacaaacaatttggtacataagctaattcctgccaggcaagcccagggcggcagctcccctccccttgactttgctatggaagctgcgttcctgttgcaaattcttgctggtcctcatcaccagatgggaagctaagtgactgctccatcccatgcccccaccccaaagccagttgatgctgagcaccactgaggtcctccctcccctggccttctccctctggctccgtgttggttggctaggttctggcttgatggccactctaccaacagtgaatccaatcctccttggagcgggtggtatatatggcgtcaggactactccagctttcctggtggaaaagaggaactgcgctggtggctggtggaagaaacaggcttttggtctttttgttattgctggttgtggggtcaagggtgatggtgggctgagggcattggggtctgaaatctgccagttgccagtcagtgtgggatggcccagctttaggcccatgtccatctgggggtagaggcgcagtgtgcaacaaggcctggccctctttgctttccaaacccctctcccaggtccatcagctgacttcctgccctaggggtgtggggcacttagcagggctgctaagaggaaggctgagatgcctgatcaaatattgactcatatatatatatattttttgagatggagtctcgctctgtagcccaggctggagtgcagtggtgcgatctcggttcattgcaacctccgagcctcccgggttcaagcgattctcctgcctctgcctcccaagtagctgggactataggcatgcgccaccacgcccagctaatttttgtatttttagtagagacggggtttcaccatcttggccaggctggtctcaactcctaacctcaggtgatctgtctgcctcagcctcccaaagtgctgggattacaggtgtgaataaccatgctcggctgactcttgtcttactatggagccaacactggttccttggtacaacagagatgcttcctgttcctcccagagcacccagtaaccatctgctgcatgggggaagtgacagagcagggctgagccattccacttgctccattccttaaaaggtcttacatcagtccgtttggtataatccattcaaagtcagcctaggtgtccagccgctccacagcacaagcatgcgacaggtgtgttagttcatgcatctgggagacaaatgtctgtgccccaggggctgcactcgggggacatacctcctgggaagcagcaagcttgccctgggagggcagcatgccaaaaacagcttcacataagcagggtgatctaaaatgtcaccacgcaccagagaaactggcaacaatgggattccaatgagtcaggctctgcccttcttccatggtgggggtgtgggcataaagggcctaactgctagatctccctccccacagggagaagagctgggggaggcaggagagccagggggaggctgtcactcagcagttgctaatttctattcattagaactttacaagatgagtagaaccaaggtgacgcccatgtgtgggcctttggtgggagggctggggagggagtcaggcatctcctgggtctgctgtagggtgtggcgctgtgtgggctgtagccctgggagccttgtactcctaggcttgagatctatgccagagaggaaggtagctttgtgggggcagggtaggggagggagagctaagcaaaaggcccaataatagcttagggccactgatgtgcaccaaccacagctggggtatagcttgggacctttcctggccccagcctgttggggccatgaatgaaagctcctgaatgggtgctgctgggcacacacagtaaacatgttgcccatgtgctctgcactggctgcctggaggagtgggtaagggcaagagtgctggagttgggcagaccccattcagaccctggcaacaacccttcccagctgtgcgtgaccacatggcaagtgacttaacctctccaagcctcagcttcatcttctatgaaacagagctaatcagactttgttacggagttactgtgagggataagtgactaaagtgtggaaggtatgaaggacagtccctggttcagggtcaggacttgtaagtgggagctatgacatcaccagcgagttcagctgacagggctcagggctcaggatgactgaccagcttgggtggcccctgctcatcaaggcagccaggaggctctccgaggccaggcatgcccgagaggagtgcgggtgggccctaaggtggcggcctgaggggcagggaggacgttagttcacaccgggtgggacacaccatgctgaacccaggccaggtgccacctactgcactagtcgctctcgggccggtacaggtaccgcatcatcaggctgtccacctctttcttgcgcttcttttcctccttcctcgacggccggtgcgtctgcccagtttcttcactttctgcagctgggcccttcttcacactggagcagctgtggctggagacggtcgagccgctggatgacgacgaggaggactcagactccgtctccgttctctttcttctcgacttggacttcttgctcttccgagagcgccccttcttccgcctcttgtgctctgaggaagcttcggagccggagctggagctggagctggagctgctccttccgctccttcgccggctccggctcttccggccgctgcgggaccgggacacatcagcagcagaggcggagcggcggatgctggcagctcgctccggggggtccagttgggcgctccgggcactttggatgctcttcctgtcatcctcctcggagtcgggctccaggctgctccgctggaatggaacaggcttgtagctcaagacctcgttgacggcagcctccaggtctgggtccaggtaggagtgacggctgacggagcggacgctggagctgggaggctcatccactgccgaggcagagctgcgtggccggggtggcaccgacagactgcgggccagcgacgggtggctgtactgcgagcaggcctcgctcagggccatactggctccatcatcccactcctctaggcagctccggcccagggacaggcgagaatcagggctctcccggcctaggccagaggcccggctcagggaagggctgagtgtcctggagaggctgtcgagccgggaggtgctgcggcgggaaccgggcgagcccgacagcgagaaactcagggaagagccagccctgtcttcgccagagccccgccgcgtggccgaggaggcccggctgaccggtgcagagacggtggaggccgggctgaagtcggagccccaccgcttctgcggcccccggccagcgcgccccccggtccccgagcggacggagccgcactcctccggctcctcggacttcctgcctgggcatggctcctccctggggcccacatgggccttcctagggggcctctcaggggaggccgcccgctcgctcagggaggtgaagagcgaatccgcgtccccggtgcccccgatggagtcctttagggtgagccgcttccgatagctcagggagctcaccaccgaggacggcctctcctccacccccggggcctccttagagaggctgttgagggccgttccgagggaggatgcgagaaccagacgtggatgagggcagcagggagagagggaggttgagagagagagaggaacaagtattaaactcagagaataaagacacagggggagggaggcgaaaggaggagaaaacggcagcagccctggcaaagtggtggtgagagcatcggaggaaatgaagcaaaataatttgcgtcagtgaaaatagcttcatggagaatgtcatgtaaattagactattgttctatttcatcacttttccccctctaaacgtttagttcaatttatttcattgtcaactacctggagcctcgtgccatgccgtggtgaaccacggcagtggggcggggaagccggcattatctgcaataacaaaatgttgtttggccgaataaattaaaccaattagagggggctgctgggtgcttctggtgaggggccaggcttggggaaggggccttgggggagctggagaagggagggagagatgttactttttctacccagtctacctgctgtctctgggagaggatgaggaagggtgtgtcctggaggatcaggatgggcttgatcagggggttgggattctatgttgtgggggcagcagggatatggctttgtggggggtgaggggggagcgagggctcttctttctccctgctgccacactggccagtaggaaagagatgggcaaggggaagctctggattccaggggtagctgtctgtatgatcagaggactatgactggctagaaaacaggggagtacattcccccagtggatgggtattaggaggaaagaagtgggggcagtgaagagattagaggaaggagagaatgggcagaaaaagacagaaatgtgcctgtaactgggtcaagaatcagtggaactggtgcctcttctgctgctattcacggtaagacgtcagagatccagagctggccagggctgtgggattaagagtcccctgtgccccatcccagttttgattccaagggtctgaactatcaggaagcttgatcaacatttgttgaatgaataagtggaggtgacatttaacttacatcaaaccaaagcctggagcctaatgggaaaacattccctggaaaaaataagggcgacgcagccctggctaagaagaaacttcctgtgcccatgcacatgccagaagcatgcccgggccgcagtcacaaatgccagacaagagacacaggcctgccctcatgggatccaggcgctacttgtccattccttgtggcacaaggtggcttttcctcccagctcaaggccatatgctcacctggaactctttaagctgccatcatcagaagctgccttggaaggtcccttgttttttgacaaccaggacttgaccccgtcaacacggtcctccagctccgagtccacatcagagtctccctcactgtagggatgaggagcagaaaggtagacaaggcataggcacctgctgcccacgaggggagcagatgggggtgcagggggtgtcttgggcaggggggatgtgggcagcatgcacgtcggtgagtcgggagggcgggaatgagagaggttagacagagcacaccattcacaaggagcctgtccccactcagcagccacactgtgtgacaaccaccaagaagaccctcaggagcatggaggcagctcccaagccagttatctgtgacaggccactgaccaatcaagggagaatgacttaaagaccatccactcatcaatttcagctaaatggctctgagctaaaaagaggagccctgggttcttcagtgactccttgaggcctactctgctgtttcttgtctgccattcctcagattgtggctatagctgctgtcaatttccatgcctttgttacaagagctgggctgccagccacagagcagaagagaagggcttcgtaggatttggagttagcttgaacctgaaggtctccttagtggatggcagcaccaacctgggctctaggttaaggaggcccaggccacatcccagatccaccctgtggcttctctggctcttaagaaacagagaaaggaaaaggggcggggggcggggggcatcagcatttccagagggactagcaacagtttcagtatctaaattgtccctggagacccagctgggctcagaaagtcccacaccagagccctgtcgctcaaggtctcctcttccgtcctcaggtagcccccagcccttgctcacagtgcttcatcgggcagagctgaccttagcacttgaaagaaagcccaaaggagtccaattctgaggctggagtcatggccaccccctcatgaagcagctgggcttggagatagcttctgagtaagattgcttctaaaattctgcagaatgtctgctcaccaagttgccctgctatggataggctagggtttctcctcgatataaatttcctttcctctgtgtcaagaggaatggctccattcctgaattatgttcttaaataaacagccacacaggcatgtgtgcgcgcgcgcgcacacacacacacacacacacacacacgaaaccagcagattgttctggggaccatgcgagagcccaactcatagagaggggaataaagaggcatgttttatgggcttccatcaaatacagaattataacaaagacgaggctggctgatgccccgggtaaacaggagtttagcagacaacctcgaaactgctaatgcaagccctgtgcccgtccgagcctggcagatttactgtggtgcatgggccccatggaacaccaataccacctgatttatacacctgtgcaaaaaacctccctctctagcttcagagcctgtaatttatcaccaccgttcataaccatattgattgcctttagaaaggaggtgctgtatgcatcgcaaaatctatgtctacatgttaaaagcgtttccatataaatctcccttaataccgtgctgtttactgctttcattaaggttatggcaataacaactgtatctctaagtaaatcgaaacattatttctctgcctgccttactgcgctgggctcaataacttggagctggggcccagagctgctgaggaaggagccacaccacctctctgccatcagccggaacctggttagagctgcacgtccccatgcgtctatgtgagcacacaccagtgtgtgtgagtgtgtgtgcatgcgtggtgtacctgtgtgtgtgcatgcctggcagtggtttagaatatgatcttaaatgcgcattttatcagcccttgaagctcttgccacacaaggatggcagggttgaaacacacaggggacagacagttgtgggcccagaatatgaattttcctccttacatacagaacagtggatgggttgcaaagctggcctgcctgccctcgccttccctttagttgcaagcatctagaagatgttcttttccttaaataatcaggcccgtaaacaaactccaggggcaggcaggctcagagggcagttgaaattttaaatggttggaattaaacctcacgtcaaatacaatttatgtccgggctcatgtgctattagttaacggggagccgaatcacgggggaacaaacaaacggagacagaacggcgggggatattaattgtgtgtgacaaccaggctccagcggccctctatcactgttacacactattacatttatcattagctctcactgagtcctgtgcgctgccaccagcccatcctggccaggggagggggtccatcaggcgagagagagtgggggaagaaacccaatgccatgctaaaaaaaaaagacctctaaaaaacaaccctgtcgaacttgatggaggatcagcccgctctgcctgaaggcctgcgcatctgcatccgctgtccagctcccacccagaaagcgggaaaagagagggctggatttcctgggcttcctgccacctgacagtaccagcacaagcgcccgctggggcctccctctgcccacggtaccgcagggagtaaagtaaacacatctggctgtgttcccttcccccgccacggcaagcagcccatgattagctgcctgaatgctttctccaaacaagaaactgggagatgcccctcaccttctacccttgtctgccaagagaaggtagtggacctttaaagatgaaacacgcccgcttctttcaggcagctcaggctcccaaggagcccaaggatgtggacagatccagcccaaacagacttttccccccagagaaataggccagggaggtggccacacttggtttttgagggaggaatgtgctggagctcaggaaggtaaacttctcaaataggctgcgctttcctttcggcaggagcccccccatcctgcccaccaagggtgcacgggccagccccagccttctggggagcacacctcattgcccgctccctgcctcccccgaggatagagtcagcatgttagcgttagagaccagtgaggcgggagtgtggggaggctgtatccacatgctgcgtgcagcggccccagggtgggagccagtgttaggggtggttagacacccgcgaggacaggcagagagcacatgcgctccagtcctcacagtttattctttcttttctgatactttgtcaccatgtcctgcaaactggaaatagaaggaaaatggtgggcaaggggtccagaggaaacagatgaaatcaatcggcaacccaaggtggaccccttagctgaagacctctcttccctcagcaagagccagctctggctggttgagaccaggtagtgggatgcgtgatggcactgtcctcaaaatctgatgcgggctgcccctggcacctctcccctgccccaaagcagcagggtccctgcgctgccccagacctgcctgcaggatgggccccagccctaaggtgggaagggggcagatctagggtccacctagggcagccctgggagcttctccatggcctggtgctaccccgcactgctggccttccttcctcgtgactgtctcctcagcctaagactacaaatctctttctctccaaaccattccccgggtgggttttatgagaaaatctctggcatagtaacaaggcaccacagcctttaaatctctgctctccccagagtggggcaggtgccatcggaaatgcagctaaacgggagaataactcatcttgagcgggcagagctggagggcctggtcgtggagaggggagactggctgggtggcctccatcagggtgcacctgtctcaccgtctgcccctgcaggacaggctgtgctgggatctggcagtaaagggagggtgggttggcggcttgctcatggggaggcagaggttgcaactgttctacctggtcgtctggttccagaggtggtcaagagggcctccgtgctagctgcagatgccccagaggccacttctcacctgttgatgaggtcctcattctcatcactctccatctcatcctcaatggcagcctgcaggtccccgatgcgcttgaatgccaactttaggtcagcctgcaggctctggttagcagcctccaggctttctagatccatctcctaggaggaagggggcagcccagtttgcaggagggctagcttctcccctagatggccagaagaagcctgcttcaagtactttccggtcatgggggtgctacctgagggctgacacaggctgccagagccttttccgctctgttgctgctgggctgtggggtccaagcctcatctgagggagtctccagtgccgctagcttcctggcctgccctcttgatatgctcctcctccctcccattctctgactcatgtgcagtttctttgcaccctatcctcaaccaggccagagtgaggcatacactcagcagctactcaaggggctgccatgtgggccccgtgggggacagggggcattaccagttcgtgcttcttgcggctcgcctcggcctccttcctggcaagctcgcccatctcctccttggtgtcccggagctgcctctgtagccgcttgttctgttccttctcccggttctcggctgcaatgcgctgatcccgctcctcagtcagcttctccatgttttccttgagacggctagccaggctctggataggtaggtggggaagaaagacacagcaggcaggcccatcagccaggcagagggagggtgtggcagagctctgggtgaggaggcctggggtcgagctctggctccaccgttcattggctacctgggcaagcaaccccgaagcttcccttgcttttctgtaaaatgtggggagaataacacctaacccccaggggtcttctgaggatgaataaggtaatgaatgtgaatgcactctgaaagatgaaaggtgctattatcattattactacaccaagactgagggagtgttctgggtacagcctggtgggcctgtcggtattgacactgcatgtagagtcctctcaggtcagcagggcttcccgcagggactctgaacccagaagccccaaaagctagatcctgtgctcagaggtaaatggctttgctggagttctgaattaggagagactaaacaatcatcagattccaagcagagagcatctctctaagcctaatgaatctcctgccaggcagtgggatgctgagcaaaaaatgacctggagagaggggctgaatgtgagggaagaaccccgcatctgcttgtaatcctggttctacctcggactggtcccccagcctctatatccctaaaataaaagagccaggctgcaggattgggccgtttgtgtttaacatcctatgagtctaaaccacaaaactctctgagcggaagggaacctgaggggtagaggtgcgggaagggactaggcccaagagaaaaggagacaagtcctgtgggcctgtcctgtgtccaccagaccaatggcctcttctgtcccttgatagctttgtgaccttaggcaacccacttaacccttcctgtatgtaaaatggggatcaaaatattatcagccagcctggggttggggtgggcagaaaataaattctttttttttttttttttttttgagacggagtgtcgctgtcgcccaggctggagtgcagtggcgcgatctccgctcactgcaggctccgccccccggggttcacgccattctcctgcctcagcctccggagtagctgggactacaggcgcccgccaccacgcccggctaatgttttgtatttttagtagagacagggtttcaccgtgttagccaggatggtctcgatctcctgacctcgtgatccgcccaccttggcctccaaaagtgctgggattacaggcatgagccaccgcgcccagccgaaaataagttcttaagtttcccctaactctctccagctctcctgagaactgtgaccccgccttggaagggtcagttgtgctctcttcctgtgtccaggttattaatgccatctagatgcccacctgtttctatccctacctaaatgcctgctccatggactgtgagctgatggaggaggtgacagggctgcccctcaccaaccacactcatcaacacagggcccagggagaaccgacggtgtggagacaaaggcttataaactcaaggagaacttaaaaataaggtgagagggatgtaaacccaggagataatcctttctgcctctctcttgctatctgctctgccagagatggaaggggctggccaatactggctttgggagaccgaaagaaaaaggattggtccagcatggtggctcatgcctgtaatcccaacactttgggaagctgaggcaggcggattgcttgagcccagaagttcaagaccagtctgagcaacaaggcaaaaccctgtctctgcaaaaaatacaaaaattagccaggcatggtggcacatgcctgtggtcccagctacacaggaggctgaggcaggaggatgggaggattgcttgagcccaggaggtcaaggctacagtgagccatgattgcgtcactgcactacagcctgggcaacagagcgagaccctatctcaaaaaaaaaaaaaaaggggaagaagagagaatgaaccttataataaagggagaggagaatgggatgggaagagggtaagaaagagaaataagattggagagaggaaaaaatataaaatatttcatgcctgtaatcccagcactttgggaggccgaggcgggcagatcatgaggtcaggagatcaagaccatcctggccaacatggtgaaaccccctctctactaaaatacaatttaaaaaaagcacgtgcctgtagtcccatctactcgggaggctgaggcaggggaatcgcttgaacccgggaggtggaggttgcagtgagccgagatcgtaccactgcactcaagcctggcgacagagtgagactctgtctcaaaaaaaaaaaaaaaaaaaaaaaaaaatgaagggagaagaaagaataggatcataatcaagaaaaagggagagagaaaaaaaaaagcagagacaggagggcagaagaagtgaggaagaaagggaatgaagcagggaaggggagaggagcagagcgagggcagatgagagaacagattccagcctgcgcagaagtggcaccatccgctgcatatttatgaccctgccagagaaccggttgaggggaacaggcggggggagctcgtggtggaggaaaatatgaagacgaagagctaagctgctctggtcccttggcagaaagcaagcacggaaacagaatgtaaagcaggcgggctccacggtagccagagagcaggccaggcagggcgggagagaagcacctgcccgtcagctggcctggcagtgaggcacaggcctctgaggactgtccgggggcctgtccagccctgctgagcatgcgcggctccagcgctggggcagctctgccctgtttggtgtggcccgggagaagtgtgaacccacctccagccgtttcacttgcgtcctttcaaactccaggcgtgtctccagctcccgtatcttagcttcctgcctgctcaccagggacttgtccaccatggactgctccaggaactccacctggctctggagggcttgtagctagaggtgggggacaggaagagaagaaagaactgagcccagaaagggaggagactgcgtctggggcaggcaatatcaccacagtgaccagaaggcaaggggagggagggatgcacctgggaggaaagagaatggagccctgggccagaggcctcccccatctgccccagtgcttggcacagagattgcccttcagagagaaaggagaaagctaaggatcggagagggaatacagatgggaaatgaggcaggggaagcccaaatgtctgttatggtgacatggctccaagcctagctcttgctcctcatttacgctgctctgtggattactgatggcagagaaaagcgccttctaaactgtgaacttgggggttcctcccacacctagtgaccctggcactctctctctcctgagggagcccctggtcctcaccttctcctgcagctcctgcttctctttgttggcttcttctagctgagcttggagatcatttatctgagccaggtcccgggaagcctgggaaaggaatgagagcatcagaagcaggatcccccataagcattcaaccagcccagcccagctggaacaccaggggaccgaggttcccactccatcacctcccaaaacaagcggttgtgcgggggacccatgaggaggaccacaaggatggtgacggtgcagagtgtgacgggcactcctggcaggggtacctgagccacggcagccttgtgcttcttcatcaattcgttcatgtcttcctgatcttcctccagccggttctggatctcattcttctcacgctgaaggcggctcagctgctcctccagctggagagaggcaaagacagatcagagggcctcaggcccagtgtgcctgtgggctccagctgcctccaatggcaggggcattgtagagaagatgataatgggctgagcctgcctgctggggtgggtcccaggactagtgatgctcaaggagctgcctgtcccgctctggaccagggagatgagggaaagggctgtgtgcagtacaggcagaccctgggcctctgagctgaatgacagctgcttcctggcagctcctttgaggctaatgagaaggcagaaaaggtctgcccagaacaaatgacccatcatcctggcactatcagtccaggccctggcctgcgtgcactctgcccccttcaggccccagggaaggacccctcaagtctgcgaaggtctcctggcttagactctcattttccctgggactgcccactccctgggcatccagccccgacagccagtcccctccttgggggaggggaagagagatccaacagcagcttcaggaaatgaatgaatctattagcctgtaattccaaaccaaaatgactgtgttggctccttctctgccccatccatcttgttactgggctgtggggagctggggaagcctccgccaagaaatttattaactcagatttaaataaaatggtaattttataacaaccttttttaacacaattaaggaatttgaattactcacctgagaactgctgaggagcacaaatgtcatggggataaatcaagcccgtgagattggcatctctcagcagctaggtgactagctcaggggccatgaagccaccagcccagcccagcctcctcccctgccccattccctgcccaaggggcctgcccactggggtgggtcccaggaccagtgatgctcaaggagctgcctgtactggccgcatcccagtaatgaattctctgccgatggatgggccgtgggagaggtgggaaattaaaagggaggcattaaataagagctctaattagctgccgcttgggcttgtcagtgggctgggcagggggaaggggaaggaagccaagccatcctgtcctcttatctgtgcttctgctaatctctaggcacctgtttacatccctcagccacattagctgcctttatttatggtgttggggcctgcggccaagctcccgtaggcaggtggttaaacagggagatgggcccttgctggctccctcttctgcccgctcctccccgaggcctctgctcagtgtggagagacgcagaggaggggaggcccgctcttcctgcagcaagtcctggcgtgaaaggacctgtcacaagtcctgacgtggagggacctgtctagggtgaagggagccacagaggcagctctattctgcctcagccccccgagctctgccccgggcaccttggcccctcaccgctgtcttggctttggcgatgtcatcaatctgcaggtgcaggtcttcgatctccacctccattgctttccgtgctttcacggctgccgcacaggtgaactctgactcctccagctggacacagaccacccccgccccagggagagatgtcagccattccttgggggcaggagggctgtacaggaaagagggagctcggatgccctccttctcctcctccattcacttcagaccccagggccatggctgtgtggtggtgcacgcgtggggatctcctcccgtgacatggctggtgggcaccaggccccatccacaccatcccaggctgggcggtgagacagtaaggcacacgcagagcctggggagtctagctgctacacgtggctctcccctctttcctgtcactttccttcccaaggactcaagaaccactgagaggagcgagagagagaaagagaatggaaaggtaagctctgttgtgcctggatcagccgtgtgctctctgtggatacctggttcttgagctgggcaatctctcgcttgctgggagcactgttcttcaggtggtccagcatgagctgggcatctgccagcagggccttggtgcgcttcaggtccttccgcagccgcttctctgactcaaagtcccgccggttcacctgggtgggcaccagcagttggggttctgggctctgcacagggcttcctcctatcttccccaagctccctcctcaccacgtcctcattatcagtgtccccataaggatgctggaagagccagggtcatgccaaccagcgataaagggctgggtgtgccaatgtatggtgatgcccccatcccacaagggatgacgatgggctctttgcagcacccccacccccgacagctctgttcgtggctccccatccctaggatccccactcctcaggccgcatgggcagggagccggccaggcttggtgggtggagcatcccctgacctggtcgctgagggtggcgagcttgccctccagctcccgcttctctcgcagaaccttctgcttgtcctcatactcttcctctagctgcacctccatctgttttaactggagtaccatggggacagagacccgtccgtccctttagtgcctggtgcgaagcaggccccttccattctgggttccccactccaggaaaacagtggggcaggcctgagcacaatgatgttggtggaggggtcagaacctaaattccaggtttctagggtttcaaagcagcctgggagggtgaggagggatggcaggccacatgcggtggctagccaagacagagtaggagagaccttgccgcatggtggagacctgcccggccaggctggctgactgcaggcagcaccagtgcagcgcagcacagcaggggcacagggggctgcccctggcacagaaagcagggagcgatagttcctcaggggcccaagcttctctacagactctgagccaatacatcctgccaatgctaggatcccgagaggcgcttcctggcccagaatgacaatggaagacgatgtggctgaggtagggaggtggaaagccccttactttaaagcggtgatgggaacaggtgtttacgctggacaggtaagtactcagataccttaccttcttctgacacgactgccgggcctcctccacctcctcatcccgactctccatctccttagaatgggtctgtctcatccgctccatctccatctccagacgcagcttggcctggaggtggttggagtagggtctgggttccctccccagctgtggccacccccttcccacctgtgcatggctctccctaggctcaggggccgagaacgtccaccagccagttccctttgctggcaccttgctcccgtggcagcagcttctccagagcagctgaactcccttactagaggtctggcataggcccacagagaggcagctggggtggggacagtcctgcagcttctccgtctgcctgcaggctctagctccctgaactgacttggtggctgggtagcaggctgggtgggcctgtggccctcagctgccatgcatcctgagcccctccctactagagctccatcagatttgtttttgtggaaagttccacgagcgcgtcttcacactgtggctggcacagatcaggtgctcactccacattttgtgagtaggtgagtgagtgaatacgcgaatgaatggaggcaggatcctctggcccatgcctgaggctggctgtggggatggtggcggcctcgctgcacctcacctctcccttggccaagccctcctgtacctgttccagcatctggatggtccctgcctgctcatccagctcttcttcctgatccttgactttggcctccaggtcccggagctgtttcttgaccttggccagagaagcctcatccttggactcttgggaagaaatgtcctggagctctgcctctagagacacaaccttctgggtgaaccctgcaatgtccatgtctttttcctggagcaaaagagatgaggctggtgcagggctgaccccaggttgtgagggggacagggcacagatggtgggtggccctacccacctctagttgctgcttcaggctgaaagcctcagcgaggagcatgtccttctcccgctgcagcttctcccgctgcagcttctcccgctgggcctcctcatgcgcctgcgagagctcactgtcaaacctgcgagggagtgtggcggctccatcagatggggaagagccagggtcccccacacagacactgtcaggaggtggtgccatggacaggactcaagcaggggtggggggacccatgcagccctaacgtggggccagttgtaaggtagcggtgacatttagaggtggcaggtcaggccactgaggccctattgagcaactgggttgggatagggagcactcaggtgagccctttcaccaagtaggcctaagagggacccacagactgcttaacaggccccctcaggagttaagtctctacattttccatttcaacacatcaaagaatgagggacccaggtgagggtggggtgggaaaaggatagagatgagcaccctgcttccactaactcactttccacagtttggttcgacaactgtaagggcaatagctagctccttgcccctgcctctgggcaccagcctttggccaggaccacgcaccccagcagtgccggcaggacaccacccggacaccccatactgggttcagagctggcattcccactgtgcccagctggccacatgcctcaatgggcacacagggggcctcgttcttcactcctccacttgccagccttccatttcccactaaatatggagcaaattgctcaaattcctcttaacaccttccctgaatagctaatcaggttcctgtggaagttgaatgctccccttaccccaactccacatcaaaaaaagtaagaaaactccgggcagctgaaacctaataagttgcccagcggggagcagggcagcacagtaactaggccgagctggcaatgtcatcgggtgctcagaaggggggtcgagctaagggtgccagcctttgggtaaaggggtagggtgggggcagagatgagaatgagggaagtggtggtcatggtgtcaggtgggaggaatagaaaaccttcctattttccccagctggggagatggtggttggtccaggaggccgggggtaacccagggtcactggaaaggttctgttctgccatcctcactcccagtgttgtgggtgtggggataccccttcacaaaggcaaccagtgcctctgctgagaagcccttcccctgcagaggagaaatgggcactgttcccgctccccagggcgccctgctgttcctagggtgtgtgggttcctcagtactgctaatgaagacgtcccatcctcattcccagccccggaaattaatttagactggattttctcctgtgagggccacccccctcctttgtatcattaccataatgagatggaagtggcacggtagtttaacgacattagtcaggagagtgtgtttgtgtagctgaggcaagtgagggagaggcagagctgggggctgagggcagggacatagaggttcctgcacaggccctggttgatgcacttcctgatggggcctggcacgggatgacaggcacatgatgcagggagcacctctgaaagcagaggcctgggcaggccttcagtggggacacagcctgagtccaccctggaggtcaggagggggccccttcacgttccaagatgagtgaccaggcaagcaaggcccctggacaaattcaggtccttccttctttcctccctggagggcgaggaggcagtcctgtctgtggctgctccagaaggttctctgggcccagggcagggggcccacccacctcctctgcttcttctccagttcgtggttgcggacctgctggccctccaggtgcagcttggtgtcttgcagctcagccgtcagtcgctggcacttcttcttgagctgctgcagagcccgctgactctcctcactatctgcctgcaggtccccgagctaggggccaagatggggtgcatatacagagagacccagaagcataggtggagaa[450 bp omitted]gatggggcagggggagcagcaggtggagtcagccagggctcagaaagctctctgcaatgatggcttcctcccaaggcagaaggagccactagccaggagaagaccagagcatgagatgtggctacatgtgctgtgccccccaaaggactgctgggaccacggccctcagtctttgtcatgatcatggttgtttcagctctacctaacaatcccctgcatttattggcacctctgccttctcatctgtttctttcagtttagccccatggaggggagacaggcctggacaaggggcatgactacccaggggtgggcatcagggctcgcattgcgggccactgccgagctccttgggcctcaggcccacctgcatcatcatcatccacttccccgttgatctccgctgcccggatgagacgggcctccatcacctccatttccataacctccatctgcttcttcagtgcatcgtactgggtctgcagaagacagggtttcagggtgtgccattccatcccctcatacccactccccgaaccacacagaccatgatcacatgcttaccaagggcagacagggatgctgggctaggggtgaagatgccaactgtctttggggggagccaatgggcactagggtatggcagtcaccagcctgctgttctcacccaggccctgccctcacctgcagttccttcatctccttctcagcccggagcctctctgctgtctccgcgtccagcagctgggaggcggactctcctgtgttacgctcatctgtcagctccgatgtcagctctgagatctggggttgggggtagggagtcaccaccagttgaagtgcctgcctcactcagccagaacacctgggggacctgcaggggctgggtctccctgcagccatgcccagtcggtgtggtgccaggagtcactcacccggctctccagccggtcactgttgagccgcagctcgttcctctccttctccgccttctcgagcttgctccgcagctgctggatctcctcctagggtggaccaaagagggcaaagtgagccaaaggcactgcgagggattggggccctgggtctgcacccctgtagtgaacgaagctgatgaagcttgggccaggacgccatggggaaggcatgtccccaatagcagagccactgcctcctggggatcctgtccctagacgcttcccaataagctagggatgcccaagattttatcgtaagaggctgtccaggggctcagccagcaccccagagggacatcttctatttgatgagcacatttcaaggatgacagctctctggactaaacgaagaagcgcctggaagcccaagataaaccagcaaggcttccccctacccagagacttggccctctcaggctgtcacatacgtctttgttccggatctgctcctctgacagctgtacttcgatgaggggcctcactgtggtaaaaagcttccaccagggccagtccttcacccctttgttcttcttgatgttcttctgtacacagcgaatggccaggtcctggatctgcaggtggggtgggggtggtgcacagcggggctctcagtcaccctggccaagctcggcccaggatcctccccaccaccagcacaggcccccagggctgctcctctggccccctgaccccgagtcagatacttctcatgctcccccttgccccaggctcactccgtccctcaaagggtgggcagcacagaacccagccctgggagcactgcgctgggcactagccactccactgccattaggaataatttcatctgctttatttgctgcctgattatttccagcaccctggcctagctgtgctataaaacctaatcttgctgaaacacaagaggcggcagtgctggctgttttatggacttgctaataagaaaaggagtcactgacacagctccttaatcttcatggagcagcctatgatccggagcccacctttgcctgggccctgattcccctacccctcatcaaagccctccaaccaggccccgtcgctgggcacaccagcacacttgctggcaccagggagctgcctgttccccaccctggcccaggacatggtgccctgggaggttcctgcctcttctcccccttatagcccccaccccaggaacttggctgtgcccatctaggttggggagggggagggatgtctctagagcagcacctttctcttcttgaagtgctggcgggccaggtagcccctgcaggctgcttggaacagggttaggttcctgctggtttgttcatcccgctgctcctccagccgtgccaaggtgcccgcccggaagaacacctgtgaaaaagcaggccaggtgaaggcaggatactgggccagcccagcagaggaaaggcagagaaggtgaggaactggagaaacaagcaggccagggagtacagcccttggcttgggaagagcctcaaaatccaattgtccaagagaggaggggaggagcaggaagaggccctgggaaggttgagggagaaggggctggggaggttttggcaggggaggggtaaggtgtgaaatttaacttcaaagagagatgaaaggagagggaaggtaaagggaagatacctggggcaaggaaggaaatggagcagtcattggtcaaacagggagggggcgtcctgccacatctgtgagggcttcctcacccaggactgccagcaaccctgtcaatgccccctgtgcccacagcccactgcagggcccaacctgggctccaggcccctctgactcccaattgctgggatcgggtgagtggatgctggaggatgtctgtgtgagaagcagcgctggggagcgcagcgtgcagaggaaaagcggggagaatgggaaggggggtggtgggaagctcctgccttctcctccccctccctgctagtttcatttcagatggtctcctctttcatgtgccaccccccaacacacacccaagtttcaccttctcatgaagaagccagtgaggtgggcgggggttggcccagctgagggacctgtcatacaggtttgggggctggagggcaggcatgtgcagaaccagctgggtgcccccacgcccggcctttccttaacactctgtgccgccctgagatagggctcggtaaaatttgccacacgccacaaagggaagtgtgtgtgaaacgggaagggtcgggtgaaaaaaatagctctatccatgagagtgggcagagacacctaggtataggcctacctccaactggcacagaacacagaaaattcctttttgtagggcaaagagaagatgtgaacatcatgggaaacacaggttacataaatgcactcagccaacagacacagtatcccaaggcccccttcagcaaagatgcaaagagagggcctaaactttctgctgagaaagctctgcctctggcaactccacagaaacctggtcccctgaggctggccttggaaaaagccagctcagtcctttgtgacacttccctaaatcccaccatcgaacatggggtttcccatgggtcttaagttctacctgagcctcaatttcttttctttaaatttattttgaacagtcttgctctgtcacccaggctggagtaaagtggtgtgatcatcgatcactgcaacctctacctcccaggcttaagctatcgtcccacctcagcctccccagtagctgggactacaggtgtgcaccaccattcccagctaatttttgtattttttgtagagatggggtctccctatgttgcccaggctggtcttgaactcctggcatcaagcaatcctcctgcctcagcctcccaaagtactgagattacagacatgagctgctgtgcctggctgctcaatttctttctttctttttttggagacagagtcttgctctgtcacccaggctggaatgcaatggtgcaatctctgcttactgcaacctccacctcctgagctcaagcgattctcatgcctcagcctcccgagtagctgggactacaggtgcccgtcaccatgcccagatactttttttgtatttcagtagagatggggtttcaccatgttgcccagggtggtctcaaactcctgggctcaggcaatctgcccacctcagcctcccaaagtggtaggattgcaggcgtgagccaccacgcctggcccccagctgcttaatttcatataatgtgcaagcctgaaatcctgctgggggtaaggaatatccaagtcccgccggaggacagcaaacacgcttggttaggacacatagccacctgaccagggcagaagtgaggtgctggagtggggggtggataatggctcagagacacaatgagaagagaaagaatggtctagaggccaaagcagtgagcctcaaatctctcttgaacatttggggggttaagggtccttttgggtattgggtgaaagctcagggccatctcctccccagaaaacacattcatacaaattttacaatgtcaggaggctctgagcccccccagagtccttattgaaactctcagggtcccatggctcagatgaagacccccctcctctgaagcaatgtgacacacagggaatcctcgcccatgagtcagtgttaaccagagcctagacgacctgaactttctttcccaaactagatgtgagcaggcacccaatgttgacccagctctgcccttgagtgacagtgggccctggggcttgcctgcctcagccgggcacctggcatggctcaggatgacagaaggtctgagatggcagctgggaagaggatcagcttgtagaggccctttcctgcccttcccaagataggcctgggaacccaggcatgggctggaggaggtgccatccccagtggcagccagcagcagctcagcctgcttgagaggcaggaatcctggcgggaaagaccagggtgagtggacccagggagagaccctgcagctgaagcaaatcctgacagcagatagccctaggcaggggcccagctggcagccccagcttaaaaaagcaggaggaggggaacagagagagagaaaagagctgaaccagacacagaggtagacaaagcagtgacacaaaccagaaaatgacacagaaagtggatgggacacaaagacacagagaacaaggagagaaacagaaaaacagaactagaaaccaaggaatagagaccagcagggactgctggggccaaagggaaagccagagacagcagaagcaaagatgggaagacgcaaagacacagagatgggagcgattgacagagacgaagggcaggaggagccaggaaagtgactcaacatgcagggccgagaggaccaagcacacaggacaagtgagactcaagcctctgcaagcacctccttccaccgcacacgccccacggggccctgcaaccgagagttccttccctctctgctggcagacaactggtccagaaccctctctggctctccactggcctcccttccaccctggccctggggcacacatgcgggtgccacctgtccaagcttcccaggctcggaagagaggggcatgcagggcttcctgcctgtgggaggaatgctcagctgaccctttggtgaggagtgacgtggcagactggcacccaggggccagcgtgcctgcattttacgcatggcgttccattcagatgaggaatttggcctgtgggcaggtggtggtggcacagcctcaccatgtcctacttgctctctggaacccagcagccccagataactctccacaggggctctacccaaggcctcctgcctcttccagcccacatcctctgggtccagccctcctgtctcccctactccccacaccaggactcgggtcaagttcagggccaccttccacccactctctcctgacatcacagaggtgttccactgaacaagccagttatccagaatgaaggaaagccaggttgctgcatctgaaacctctagctccctggcccctggccctgaagggggcagcccctgagtggctgggcggggtggagctgggggcaagactcagagggcaccaggagactggtgatgtctggctgagcaaagagaacaggaggagtgggccagccacctgacaggggcccctggagtgaggcccgactgccctcctgtgggacaactcacccggctcaggcccatgcagcagctgctcttctccagatccaagcactccagcagctcctccactgcctgtggagagaggcctctgtcaggcagcccgcctgggcctcccctcaccatgcagggctttctccaggcccttggcccttcccctccctcctcctagacagtctgttattcatgcacttgcgtgggcttcctcagtgtcaggcactgggttggactctggggacatagagatgactacgagaggaacaaaccgtcttgctggggagcaagacaagtgaacttgtgcagtgcccacaggaggtcgcacctacgcaaggcacctcagacagctgttggttgtgctgagaacttatgatacaagtgagaatttgttggacaaagtaggggagagggcatttcaggcagaggaaccagtgtacgcaaaggcctgggagcacaagacagcaaaatgcactgaggaaactccaagtcactcactggaactggggggtgggtagtgaaggtgcaactagagagggggctgaagccaaagcatgtggagccccatgtgcttcgggagcccctgaagggttctcttagggatgggcatgatcaggtctgcattggtagaggtctcactggcaaatgggtagatggatggagacccaccccacttaggcagtaatccacaggaagggaggctagagcctggcccaagggaaagagaagaggagaacacgcagcaggtgttaaggagacagagccttgctggatacggggatagggtatgtaaggaggaatctagggctatactgagatttccaatttacgtaactaagcagataatgatgccattccccaaagtagggaatataagagaaagaggcggcttgtggggagaatgagtttggtttgaacaagctgagtctgagatgccataaggggtagggtagagaagtccaggaggcagccagatagaaatgtatgtctggagctcaggagagaggcctgggctagaggtattgatttgggagtcatcaatatatatgtgataattgaagtgatgagtgtgaatgaggatggccaggaagagggtgcagaatagaaaatacatatggccaaggacagagtcctgaggaagacacctctttacttcaggggcaagtggaaaagaggacctcagagggagtgagaacagagtcaagggggaaaccaggagtggcagcaaagaggcccaggagagaatgtcccagaaagaacggagccccatgctgctaagaattcaagtaacagagggatagtaaagtgccagttgggccaggcgcggtggctcacgcctgtaatcccagcactttgggaggctgaggtgggtggatcatgaggtcaggagatcaagaccatcctggctaacatggtgaaaccccatctctactaaaaatacaaaaaattagctgggcatgggcctgtagtcccagctacttgggaggctgaggcaggagaatcgtgtgaacctgggaggcggagcttgcagtgagctcagatggcgccactgcactccagcttgggcgacagaacgagactctgtctcaaaaaaaaaaaaaaaaaaaaaaaaagaaaagtgccggttggctctggcaatatggagggcgtgagggatgagaagaccagtgccagggcatcagggagagggaccaggcagccatgggcagtgagggcagcaggaggaaagcccagggcaggcaggaggcagagcacagtccagggagacgatgacagaggctccttccagagagcaaaacctgcaggtctgtggggagtttctccgtggagagaaaagggccaggagaaaaagagatgccagaggaaaaagagagagaagtgaattcacactgatggaatgggtctctggggagacccaaggaaatggactccaaggcacaggatcaagggactggatgagagggaccctccccaccaagacagaaggggtacgggaagaaggaggctagggaagagaggtttgcaggaggcagaagaagctggagcctgatgtcctgagatctgaaggctgggcatctgctgggaaggtgagccaggaaggtggggcggggaggatttgagaagaaagatggagaatgcaatagcagacaggaagcctggagtcacggccagataaggaggggacatctagaagacttgctggtccccctgagggcccaccaaaggctgaagaccatgaacctgtaggaagtcaagtccacaaagttgtataattttctcccaccacccttgggagcccaaagcaaggagtgcagacacccagaggctggcgcttcggtgggagttgggcaggccaggtgctgcgggaggctcaggagggctgagggtgagggaggccgagtgactgcagagtgaaccatggaaaaggagacaattcacagagaaatggagtgtgatccagaaagagaggttctgatggagccagagagcgggtgtcctgaggggaagagaggagtgggaccagcaggcacgaggctgtggtcagagaaggccatgctgggatttatgattttggagctggggcatttccagagctgatgaggtactggtgtagccacaggtgggaggctggaatggaggctgagggcctgtgagaagggggcgtgggacgggcatctatgtccacatgaggttgcccaggccaccagcaggccaaaggatggagggaagttcttccgagccccctccatgaattcaggtctttaaggcaggggtggaggggcaggggggcacacacagaggcaggctgggcactctgtgggctttctgccccattctgcagcatcctctccatttagggaagccatcctaaggtctgaggtgctttcagaatcaggctggatgcctgaggcccgagcacagtaaaggaggggtcctctgctctgggagccctgtgactgtctaaggggctgcctctggggctcaaggtgatagcccagacgggcagggacaccccttccgcagccacaagttcaccaaccagggccggcaaatggcccggcagcctatgttcacctggcaccacggaggtctcaccatatccaccttccttctaggaggaatgttcgcccagccctggacagcttcctgcttcaggaaccaatccctgacatgggggcccaggtgccatcggtggggctcccaaagcactaataattctcatgcaccctcagtgcgcccaggccctgctcgctcctggatgattgtctggctcaccagcaagcagacacccccagctcaggcctccaaggagggggtggctcttctccagctcctatggtctgggccccaggacacagctgggtgcttccaaaactgggagcctgagcagggccagatgagctgtctccagggaagggaaggcagatgagtctggaaagggcagctgcttgaggggcctgggcagagggagagcggtctggggacctggacctacccgcctttcatccaccacgatgtagttacgcccgtgtttcttggtcaggtgcggggccaggacatcaaagcggcggcggaactcggaaaacaccatgtggtcagggtaacctagagagagcagcccagagccaggcctgtcaacgccacctgctcccagcacaccccagtagccactgtgcctgggcagtcagtggagagtcaccaaaagggaagaaactgcagggggtggggagcctgtggttgaaggcaggcctagaaaggagagggggtaggcagggaagaggaagagaaggtcaggaggacaatcaggcctgctccacagggggataggaaggcccaaaaaaggaacagcctccttcagagagaagtaagctcctagtagtcagtgaggtatgcaaatggggggttgtggggtagctgaccagctgggaggaaggctacatcccaatccccaagatgctttccagccctccaagtctatgcctcagtgataacccagacaaaataatgtcttatggtcttaaaaaaaaaaaaaaaaaaaaaaaagacaccaggccaggcgtggtggctcacgcctgtaatcctatcactttgggaggccaaggtgggaggatcacttgaggccaggagtttagacaagcctggccagcatggtaaaactgtctctaccaaaagtacaaaaaagtaagccgggtatggtggtgcatgcctgtagtcccagctactcaggaggccgaggcagaagaatcgcttgaactcaggaggcagaggctgcagtgagccaagatcacaccactgcactccagcctgggagacagagcaagactgtgtctcaaaaaaaaaaaaaaaaaaaggcaccagagagtagctgagaggaatcgcgcattggctaggtgctggattcctggccctgcctcttaggatcatgtgaccttgggccagtcactcaacctttctgagcctcagtttcttcacctttaaacagcggccctcgcacttatctcgaatggtagtcatggagattaaatgagaaaccaggtaaaaagcacagtgtgactcacttggttggcatttaataaacactccttttccccctctgtccactagagcaggacatgagaaaggctgccctccttgcctcaccctgaccttgagtcctaggccaggtgaccaaaaagacttgtagattctctttccctgaagagtgtctgggcttcaggtcaggggaggtgtgacctgacttttggcttggagcaaagtgggtcagagcagtggctagcaggaagtgaccccaagtcaccctgatcttaccagagcccagggtggagggccacgaactccactcccacaaaatcacagaatttcaaaccagaaagggatcttaagccagatccaactcatctttcagacacagaaacggaggcctgggaggagcgactgtcttgctcaaggtcacaaaggctgctgctgggggcagaactggcttccaaacctggactcctgacagctagccaagggcatgctccacagcaatgacgggctagctggctctgggaaaccctccagctgggaggtgaggctgatgcatgtgcctgataattgaaacaggaggtgggggctgctgaggggccaagacaaagtgagctattgattgtatctgaattgcaattaaattgatgggccaggatagcaggtctggacgcctggcatcttaattaatcatcagtgctatagtgcggtggctgggggccgggtgagggaaggggggcctgccgctgctggcctcatcgatctgcttgtttgagtaacgcacattgattttggttcagagcggtaacaatctggttttgaaataataaacaccaactccatatcaagacgtggggacagatcgatgatttatttagagcagggcagggagcctgtttcctggcttgggctgctaaggaagttttagtgcccatgggaatgcctgaaggggacctggctgtgggtgggtgggaccctacctgctcttctagtgaaggagaaaaacagcagaaacccagcaactcataacttctcaggcaaaaaacaaaaaaaaaacaaaaaaaacccaccctacttgagagacatgagacatgactctacagccagcctgcctggtcaaatcccactctgccactcaggagctgtgtgaccttgggcaagctacttaacctctctgagcctcagtctcctcatctggaatgataccagtgtgctatcccggcccccagccaccgataacagcttctaaggactctaagtaaccactaatactatcatcctgtctgtcgcctcctttagatgggtccataaaaaagggtctgtctgacctttcttgggaattttaagtacttcagaaagatttagcacctcatttctcactgggcagatggctccgaaagggcactgggtttgctgctgtgggcaaagctgaactgtccaaactagggacgtgggaagaaagggagctgtggacaaatgacaaggtgcagggtggagctaggaagggagggggacaaagagaactgaatatggaagggagaggaggaggcggggactctgcaggatggaaggaaatggacaaaggggctgtgggctgggagagatgaggagagaccagagcagaaaggatcgtgaggaaagacaggagcagccccactgcagcccacgggtcgcaggtgggaggtggggccgggcagggccagctctggaaaagagagcccagagtggagaggaaaggaggccccaccttggcggtacatgcgcatggcatcgagcaggcgggagccgcggagctgggtgcggagcaggggcacgtcgagctgcaggagcccagcctcgcagtggtctcccgagggcaggtccagctcactgctgctgctgactcggcgggaggaggcggaacggggctccccagcccagccctcagctacaggcaggaagcagtgcacaaaatgcagctttgacttcttgatggtgtcgatgagggcgtcctgccgaggggaagagactgccctcagtgggctctgatggcctgtgctcagaagagcagggactggtgccagcgtctccactgctcacagggtagcagcggccccagcaccagccaggacatgctaaacctggacaactctgccctcgccgggcctcggtggccactcacaggtggcagcactgaaaagaagacccccacctgcagccattgagtcacagtgggacgctgagtgggcaccagatggcctcagtgtgctcggagtccccaggcctgcctaccaggggtaaggaagggtccccaggcctgcctgctgggacccggctggcactcaccacctgtagcttcatctggatgcacagtgacttctttttgacagccgccatgcctgtggtaaaggttttccgcatgctggtggcccggcgcagtgccagctgcgagccgccctccaggcccgcgatggagccagagagcaccgtggcactgcctgcgcggcccagaaacaggttgctgatgatttttctgccagaggtgggaggataagggaggaaaagcagtcacatcgatggagcgggaaaggccgctcctcccccaaggccccagaacactaaacagtcccattcagccacgtccaggggcctggctacctgaactgcatgccccacaccctacagagaaacaaactgtggagaaattttcaaacagtaaggagagaaagccagaggtgggcagaagccaaggggtggacaggaatcggacagaggggatcaatctactcatctacttcccctcaccagggagggcaaaggtgtggaagagtttccaatgtgacaggaggggttagggttcaacatcttctaacatacgatataatttatttattatgtttattgttcattatctgtctctcccattagaatgtaaattccacaagggcagggagttcagttttgtttactattatctgccaagcacctagaagcccctgtcgcagggtaggtgcccactaaccatcttctgaagagtagaacggatgacagggcccgtggggctgggggttctaaggccgctcctgccttctttgacttgagggtgttcttcacatttaaaccataggctctcccaccatgtctgcctcccacctctacttcaagaggcccctcaagctcctcaaggccaagtgccctgggctgttgcctctcaggaataaaggccatctactttgctagtgagggggcctctgagacaaccccagggggagggagccccaaaatcaaaacagtcctgggtacagaacaggggcggagggagtggtggtcttacttctgggagtcctgcaggagccggggggcattctgggtggctgggttctgcttggtgtagttcagccagccagtcacattgtactctacccagttggtgccatggctgtggcccaggagaaagtggtgtggtttgctgctgtgcagaagggggctttggcctgatggtgggagaagcaagatttaggtcgtcagggtacaggcacaaagtgacccccgccccctcccagggagtgccacctggacccacctgtatgtaagaggaagcagaggagctaccctctagggatgccacctaccttttttgtcaccttcctgggggccataataggagaaaaggcgctccaggagggtgtcctcactggcccctggcaccagagcctcctcttccaatagccagagcaggcccctcgcctcgtctgtgcgggccagcgagcggacctacagagaaggaaggaaatccctccttgtcatatggagctgtgggaaaggggccagggtggtgccgggcccaaacacaccctacagaatgctacacatgtgcacacatgcacacacgcacatgccgcagctcctgccgctcactgctgacaccttgtggaggaagcgggcagcccggggaaaggggagccaagaaagtgagcagagggaagcccacagcaaaagagggtgcttagcactccagtccaaagtcaccaaagactgcagccttcctgctggcccgagcccgcgccccgaggccctcctccaccctcgtcccctcggaggtcaccagggacttggatgaaccccacattgctctcactccctggcagtggcataaagtctggaaggccctgagcacaagagttggccctaaggaagctgtcagtaagtgacagctgtgaggttaatcctggtctctgaaaggagagaacccagagggggctcagatggctgccagtgggatcactgcagggtcactcaagggccaaaagcataagacaggtgacttaacggacgtggcagccaaaacgggtagaggctggggcaagctagagagcaggtatccctatccaaagggaaaaaccaccactgagctgcagctagctgctctcctggaagaacactggcctagcattgataaaccctctggttcttcaagagaaggtagaaatatctaattctaatttccaatatcccatgaaggccaaacaaactaggcctgtggccacatctggcctgaaggtgccttttctgtggagttcctgcatctttcttgggcaggaaggatggaaccttccccacaccctattctggcctggccttcaggggctggaggaaaaaagaagtgagaaaagggccatttttcctctctttgaccccagctgcctgcatctcctccccgcagatgcccaagggagttggcgtgattaccagaaggaagcagaatgtggccaaaggccaaggcaactctagtggcaggaaccgagtagcaggaacgagcaatgaagcaatgagatgggaagacaggcttggcaccgagggccccttccccaggggtgcagccgccccatgccaaggtccattagtcaggagagaccacagaagagaaaggagagccaagctcttcccacatgctgtctgactcctgctgctcatgctgacatcccccctctcccgggaaccacaacggttctgagtgaggccaccataggagcccaggtgtcaggaaaagaaaattcacttccctggggagatgcggtgcttgggcactttaaacatctgtccccggggggatactcactctttcgcagccccaccacttgtgcaagccaagcagggcctcatggcagagaagagggagggagaggtagggatcaaagcagagcagggaggtcggcagcctcgcaaaaatgccagttctccaataaagcaccttatgcaatttccctaatggcggacaatcgccaaatgccaagagtttgctaggccagccagtcccccaccgagtgccaaggtgcccaggacactagcacaaagggtgacaaagcctgcccccaaagttgaggggtgagggttcatatccatgacagtcccccagagggcgtctgacagcttagcactgtttcccctgggagcgggaggctggctcctggccctgttctgttaggttgcaccagtcctctacttggggacaatgggagggaatgactatgtccttggggtctaggccctcaccagctgggactggtcaccagggctcctagcagacatactggaggctcagccagtcaccagctggggcccgagcctcagctgctgagaaaggagatatgctttcctgcctgactgggacccccatgggctgtggctccccagggcaccagggcagaagaaagtgccaccttcctggccaagactgcctgagtgctgaggggcagagccccagcaccagagagtagttggtgtctgggcatagctgctggaccctccctcagcccacagtggcacccccagcagcagctcagatggggagggctccaccacggggagaggggtggggaacgagaggaaaggcttgcccaaaccctctctggagctcctaccagggactgatgggaggcctggtccacagcagccacagagtcatccgtcgggggttccaagtcgtcaaacgccagctcgatgttctcctgggaaagaaggccgagcggtagtgagcatgggggtcacattgtggggaacagccttgtgagtaggctgggaaggggctctgagatcagcaaggccaacctccttctgtgccgtgcaggagctccctccatcatcccaaatgaaacagctcccaaggaaacacactgtattttttgcacagctaaaattctcagaacctctttttatccgaagccagagtcacattctcattactcacatgagttgattaggcaacacagaacaagcccactctcaatttcacacaatcatccttgaaacacttgaagacaactgccattttccttctgaatcctctctcgccccaaataaatatcctgacaattcactcaactcacttccagatgaggcaggatttccagttctcgtcccatccgggacacccttttacagaaggcactaaatcatcacctggcaccctcacagatcagggaagggagacgggaaggccaggcccagacacacttggagcaggaaccacacagtggcaatcaccaggcctgggaggtgcctcaaaagaggccaagggtagcctcctgggggccctcaatgcacctgtaggcttcctggagagtaaactctccaccaagtaagaacgtagccaaagccagaggccacggacaagggggcaaggaacgactcctgctccagagagcgcaggaggacagaaatggagagtaaggtgatgccttctgcatccacagatgccctcgctgtgggtgccaaggccagaatctgaggctagatgaggcccaggccccagagctacctccttgtatctttccaactcctgcacgaaggtgcgctcgtggaagagcctctgcagccggtcttgggtgtagttgtggcacagctcctcaaaggaggctccgcgggctgacccaccctgctcagggttctggaagcccggggtgtcgacaatcatcatggagcagagtgagtgctggctggacttgagagccctggatagggacagcctgggtcagagcctcgctggttggccccgggcaccaggaagccccaccctgcccaagccagacctctatccctgcccaggaccctggtggggagggcatgctggccttgctcatagcccatgggacagggagcccctgctggaagagaccggctctgcctcggccaacaaggcatgaaggcatctactccacctctgccaaagcaggaaaagccctgggtcctgcctggcactcacctattcaccagggagacgagaagggtgaagagctcgctgtagaggccggccgccatgccctcaaggcactccagtgcactcagtttcgggcctgtggggcagggggagcagcgctatctccttctccccagggctccccatctgggtaagcccctgacctgcccagggcccagtcagcacggggcctggggcagggcctctgccactgacagagcatctgttcactccagcagtcccctcccgccccagggatggcagcaagccccagatgaggcctcacactcacaactaccagccaagggacaaagggtacctgtcccatctcccaggccactctcctcggggccctggcggaaggaggtggagcgctgcagggtgccacccttgtgctggtgcttgaagatggctgaggacagctcctccaggctgcagcccagtaggtacgcagccttctgggcccactcatggcgggcaaactgcttgcgcccagctgtggagtggaaaaagggatctggcatcctgggtctttttccttaggccagctgatgacctgatgaccagctgatgactatgcatcttctggaggcaaaagccagccctgatgacacccgatgggcttcaggcagaacaggggcagccagcagtggccagcatttcctgtgtcccgtggggatggagagaatgagcaggtcctaaaggaggaggtaactccacatgctgccaccggagggcaacaaaccagctgcaaaaatcccttttcagatggctcagctccggggatgcccaactaggggaagggcggagtcagaggatgaaccagcccacctgggatgggcacaagaaccccgtgtgcctgtgggggacttatcttgagagatcgctcatgcctccacattccctgagtacattagaaccctccctcttgccccctggcatctgccagtggagaccacaaacacccactgatggcccaacagtggggaggcaaaaaagccacaggggaaagggaacagcccgcacagacatatgtgcctcagccaacatgtgtctaatcacggcaattagggaaagctaacaagaaacaaggttttaccttcagcagcttctgtaaggcaaaggaccagcatgcagcatgcaaagaaaaacagtgtgttagcaaacagtcatcaatagagctcgccgcctcggagggaccgtggggcgggggtgttgtgaggatgagtaggcaagaaaacacaaccacagtcagacttgggacaaacgcacacacacacagtctccagggagtatgtttgtgggtgtaatcacactgacacacacagaaagagacccgcaaagacatttgtgcacatgtgtgtgtgcgcaaacacaccctccccccccccccccccccccgccggaaaacactggaagctctgaggcgctaacagacattgtttgagaagatcgctgtgctgacacccggagctttccgcttgcagttggggctgggtaggttagaggaaagctaggcttgtcaccgcctcagagtgaagtaacttccctcaacacacagccacacgcctgcccgcctgtctgtcctccacattctcgagaaaacttctctaacctagagcctggctcctcctgggcagggatgccacttcttggggtcgctcgcatggagcctcacgcctgggcacccattcctccatacacccaccacctgccaggactttctcactccagctgagcagcctggggcccttcacatcccagaaggggccaaagccaaagcccaaggtgctgttcagcgccagcatcccctttccctaaactggagaaaaagggggtgaagaggtgctcgaatcgccatcctccaacgtaagtcatcttgaaggatggagcagagctcctccaagccaggccaagtccccgagcgcaagtgccaaagctgcagcccattcgttaccacggtgcctgctgccccctagtggccgccaccctgacatgcaagaggaagatacggagctacccaaccagtggagaagggaagaggactggggaaaactggtctggggaggccccaggtagcaagcccaccctaccccaccccacggtgggcatcctgagaggttccaggattcagatctaaaactggcaggagaagcagctactcctgggactctaagacaccccacagcctgcaggctccacttccactctcaacctccaggcttctccccagaccagtcctctctgcagcaacagaacaagcccagcccctagaaagtcctgggcaagcaccaagacagggcacggcggcccctatacccaagggcggggccaaggtcagttacccgcttgctcctcgggggcctctgtcaggaagggaacaagaaggagagttattccagcggggctgccctgccttagtgcccttctcatccctcagcctctgaacccccagccctccatgcttcctcatggtgccccccagcacagccagctaagtccaggcctcgggtcgtcactgccaaagatgcttcccgggccttctgctctgaagtggggggctgagaagaggcacaagcaaaagagggttgtctcagaacggctaagtctgtgctgggcaagaataaactgggagtgggcagggtccctgtgaggtcacccaggggacaggccagcctactgggacccactgcaggttacctttggtggctcccgcagcccccaggtggtagatggcagccagaatgaaccagcaggccttctgttcatcgggggagatgcccagcaccttcatggccgcctgcagcttactaaactgctgagctgccttctgcttttcctcaggctgtggagatagatgacctcaaagggctgtccctcccagcacacccccatgaggctgggccctcagggcaaggcttgggtagagccagcagctggagctgggctcccactattcccacaggacccatggaggcttctcctacccccaaggcccagggctggcaacccagaccccacagacccctcaccttggccagtggcacaatcccaaacacattgttctctgccaagtggttgaggtggagctctgtcctaggggtacaaataaggcatcagcacggcacttggtccccatgccaaggccatttccgcccagggtggagacagacagactcagcttccagactccaagttttgtctgcccatcatcccatcatccccaactggcgggccagctgtcactgctttcctaactggcctggatgcctggttagagtaccattctcctgaggacaagccaccagacatgccctggtgagaggatgcaacctggcccccggaagggagcagggaacctgcccgaagggtgagtcccgccaaggcagagacgatgccctcagttacaagaagggctaaagaggacaatggcctggggatgctggctcagcctcatcatttatctctttttagtgaacacacgcggcaaatctgaatgtctgaagggaagagcgtggcagaggcagccaacgtggggcaggaagggctagtctggagggcactggaagaggcatgggcttttggccccagtgtggattcaaataccagttcagccccctaccagtcatgcgacagtaggcaagtccccaaccactggtacctcagtgtgctttgctttccagaactggcttcatgggtaatggagatcctagctaggccctggcaacactgaagggctggctgttcccctccaatacagccaggccccagtacccaggaccagggagttcttgataggcagggactatgtctcatccatctcactgtccctggggcctagctcagagcctagcacatagcagacatgcactgaccaaacagtgcaggatgcgatcaagtggctttaattctggatgcaatcaaggtccaggagcccagtcagtgggctggagttcagagaacccttgtgtaccctctgacccatctcacctgagggtgccatccccacaggccagcaggtagtagaagacgttgaatgtggcttcactggctgggcgccgagccacacgcagcttctccagaagcattgtctgtgacacagcatggacgtgtgggtaaggagggtagtgccagatcaagtttctcccaccccacataagaaggaatcaaacacatggtcctctaggccctggggaacaagcagctgcatttttttttttttttttttttaagatttgagatggagtctcactctgtcactcaggctggagtgcagtggagcgatcttggctcactgcaacttctgcctcctgggtttaagcaattctcctgccttggcctcctgagtagctgggattacaggcatgcaccaccatacccggctgatttttgtgtttttagtagagatggggttttgccatgttggccaggctgttcttgagctcctgacctcaggtgatccacccacctcagcctcccgaagtgctgggattacaggcgtgagccaccgcacccaacctgcatcttgttttttaagtcttttttttttaagatagggtctcgctctgttgcccaggctggagtgcagtggcgcaatcacagctcgctgcagccttaacctcccaggttcaagtgaccctcccatttcagcctcccaagtagctgggaccacaggcgtgcactaccacatctggctcaattaagcaggtgcatcttattcccaaggtgctcaatcagataccagatccctctaggatcaaatgggggacagaaaccagaatgaggtggaagaagacaggcccagctcccaaaggggccctgctgctctgcccagaccccaggtgcctgccttctggaaatgggagcttgtggtgaggtatttagcatgggagggaatcagccttggctgggccttactttactgacaagccagtcctctgctaggtgaaatcggcccgagagaagccccgagcatgaatctcagaaagtgggaagtaaggctgaggcccagcagtagagttaggacaaccccagggttgggagagtgaagggaactgggcagaaagctggactggccccatccagggcaggaggccctgagggcagaatggtgatgcctctggatagtgcaggccaaccctgcccatgcctgggtcaattttgttagggtagaatcccaggaaaatgaggcatgggagagagcctgatgtctaggtcatgaaatcatgtggcctgtgtcctactaccccgagtcctgggcagcactctcacctgaatggaggctgaggccacctggccagcttggtcaaagtccagggagaggatctgggagaagcgggtggcattgccattaatgatggtggggctgttcccaaaggcttccaggagggtgtacagagcctgccacttctccactgcagaatacaggcccaaggggatatcaggaaagccaggggcagcttatcccccagctaggagctaccccagaggtatgaaggcttggggccattcagaccagaactgcccgtggacagaggggtttcggggggatggaaaggccagggagaaaaagagctggcacttaagagggtgctctctcctcactcccctcccctcaccccactttcagttttctcccttgtccctgcctcaccagaaaacaccttgttcccgctgatgcccgcgatggtggccaggtactgcaccagatgctggcagctggtggtcttgccactgccactactgcccaggaggatgattgactgatcctgacggctcatcagcatcgccctgtatgcggtctgggccactgcatagatgtggggtgccatgtcctcccgccgacaacccttgaacatgtgcatcaccttgggcaggagagcaagggagagaaggggttggctcttagctgatcccattaagacacccctcacccccaaggtccacatctttctggattttccctcctgtagtgcccagggattccaaggccaaggccatgcatggaaatgaagacactaagtcctggactccatcaaaggttgtggggaggtcctgtcccccatctcttgaaatgactcctcttcccaaggtcaactgtgagagtggacaggagcccagtggggtgccacaggggaagggcagagagccagggcagggggtgggaccaggagtctgcagggtagccttgagggtgctgcaccttctcagagtacacagcaggggccccacgggggccaagaaccagcaggctggggccagcatacgtgtgcagcaggctagcgccatagcgctggcgcaaggtgtgcaggacgctggactcattgaggtacaccagtgaggccagatcctccagacggtcgcaggagggagcattagcctgtgtgggaggacaggcgggtgggtattagagcagcagagcccatctccgctgccagaggatgggcctgccctgcccagtgcactcctgagcctcctcccccacacccagccccctgcccacctaccttctcaacgtcatcctcatccacatccaggatggccccatcgtggtccagcttcacacgcaccttcccctcaggcaagttgagctcctcagatttgagttgactggctgcaggggagggacagacagctgggatgggcctgggaagcctctgctactccacttgggaacttctcggtcctatcctcccccccactgcatcaccagcctctccttgctcactgctcagccctcaccagatgcagaaggcacattcgctgcccagccctgagaccagtgagtcctgacatgtgcccccagaccctctgagactcacccagtgagaagccgtccctatggaccagccacaccttctccgtctcattccaggcctcttctgctgcaatctgttcttctgttttcgcctgtcagagagagagaagaataaacaggccctgctatggaagacagggacaaggacagccgtagaggggagacaagtgagggcatgggctttgagacaagccactgggcaaggaatgagttaggtgacagacacagaacacagggacatcagaggtgtctgggaaagagggtggggaagctaggaggcaagggtggctctaaggagccctgaggacaggacacaaaggctagagaccgtaccatcagtgagggtctggcaagacagggacacagggatcttgtgcccaggaaagaggagaccccaggaaagcaaatcaccaggttctccctcagccaccctctgctcctccaccctgtcaagcccaggagatcagtgtcctgagtccaaggccctagaccctagccacagctactaggatcttccgtgcccagcttctcccttcatccaaatgatagggcctcctttgccaagctgggagagggcatgtcctcagatctcagcggggagtcgcctggacttcgcagtacagaatgataggtgggctcagagccctggcctcagccctggccctcccctccagagggtgctctacccggaccgggggacagtgcccaggtgcacacatcagcctccctgctccttctccatgccgccatcagcaaagacccctgtcacacagacctagtggacacgctaatgccatacaaaggcacgaggcagtgcggccagagatatgggggtaggggcagccctgccctgtcaaacacagggagaggcttacacgttatacagatgggcacaggagtggtgtaaaggggctagaagcccccagaggcctcaggaggtcaccaactcagacataagcattcataggtactgacggtgtggggctgtcaaacctggcaccctctaagaaggacacttgaactgggaagaaacggtgtctgggggagctggggaaacagacgagggacccagggcccatcgggctcctcttgttgtgtgtgggcgaaatggcagcaaggtcatcccgtgccccgggtgggggatgggcaccccagtggcatggacccaccctcaggttagcccgagcccctacactctcggagggccccagctgtgaggcacagtcagcctgaaacctgaggcccaggcatggacactggctgggtcctgaccccctgggtgagaaatcaggaaaagataagaaaacataagaagtatgttctttgtcacatttcttggagttgaaagtaaaggagacgtgggctctcctctcaggttggcttctggctttagacagatccctccagtgctggacggcccttccccagattggagtaggagggctgggctgcaccagtggctcccagatctccgggtttcatggacccatgaaataactctgaataggaggatcaccacgtggctggccacattttggtgtgttaagtgaggacattaaaaaggctagttctttatatttgaagaactataactataaaaatcatggccaggtgcagtggctcacacctgtaatcacagcactttgggaggctgaggtgggtggatcacgaggtcaggagatcgagaccatcctggctaacacagtgaaaccctgtctccactaaaaatacaaaaaattagctgggcatggtggcgggcacctgtagtcccagctacttgggaggctgaggcaggagaatggcgtgaacccaggaggtggagcttgcagtgagccgagattgcgccactgcagttcagcctgggcgacagagcgagactccatctcaaaaaaaaaaaaaatcattacaatgttgtatatatatattttttctcaaatcacataagacaggggagacctttatgttgaatagacaccttctatgggccaggtatttggggactgatgaataaggtgacatcatagcctgtaactaactcccttaaagctcatctgaaaatgggtttctcacattggccaggaggtggagacagagaatgtctcacgttcaggcatgggctgggaagagggcagagattctgcctttccagctttctctctccagagtgagcagagttgaaacacctagaactcaaccaggccccccttgggctccagtggctgagaaccacatgccacatgggcccaacttgaagggcgacactcggtctagatgctccccaggggcctgacacagagctgcaccatctcaagctcccggcactacctcccgctggggtcctcccagacacagggtgggagcctggaggggaaagaggccttacactccagcaggaggcccgagcacagacgccagcccaggtgcaggccagtggggctaggtggtcactggagggagcggagggctcctgagtggggggagagcaccctacctggctgtgggcatgagaggcggcctcagagtccagctaccgacagcaagcaaaggagagagagagaagaagggtgaagataagcagaccactggcacgcccccttcagcaagtgctcctgagtcaagtgggccggcactctctagttgtccaaggctcggggtgaaggtgggggagcttggtgccaggacctgggacctggcctgagcaggtgaactgcacccagtcaaggagaggccaggaaggtgaagagacactagtgaccatcaggcctctcagaggagatgctcctctaagtcattcccggtggcccgggcaggagtctgccactctgcctctggccgcagtctctcctgggctggccatccggtctattctgaatcaggctccctcttctgtgtgtctaccaggtcaggccacctcaccacacccaaggcctgggccccctgccagcctcttgccttatctccagagcatttctcagcctagctcccctgtggccaccagcacagagctgttccttgccttctaacacagcccaagggtgccactccctaggccaagggctgtgttcagagctgtcgccctgcacctctcatagaacacagctcccagcagcttgcagtctagaatctcttcctcaaccccgacgtaccctatagcactcccacctctgccagccaggcacaccgaccccatctagatccaacctggggaccacttgacagctgcccaagagcaaaggcactgtgggcaaaccctgtggccagccgtgacctctctggttacttaaagccctgaaaagcctttctggggaggaaggcaagtcaaccaggacttggatgttacctgttagaaatcggcaaggagttatcaggccccacctgggtctagagagccaggtcaccaaaaatagcgacagcaaccttccttaccacccgccaggccctgacaccaacacatgtcctcgaggcaggacaatgtggccagagaaagggactgggccctgagcgaggaggggtgccctcccacatgcacaggactttgggctctctggaggaaccactctccccagagcacttctctcatttctttaagagagagcccaacatgagggcccacaggccgccatggagccatcttcatggtcagcgcgcctacagacacacacagggtcctgccgccagcctcaggaagagggcggccagggactgggacccacacacaagagtggcattacagaagctgtgaagatcctctccagccgctggtgggcctcttccacgggggtcagctggaccttggcagctcctgcctaaaggttaaaccactattagtcccagcccagaaatggagaggccacagcatgcggagctcccagcccaggaagccactgggacccactagggaaggggagcagcgccagggagcaagccgcgcggcaatctgagtttttaaaccatcagattagaaaaaaaagaacaagtgcctgggagttctggggttatttcttcccacctgcctatcttgagcaccaaatggccctattatcccacttgccctctggacccttccccaggcccaggtgacaggtggctaaactccaggtcagggcatgtctcagctcccatctcctcccttgtgagaggaggagggacggggaggagggacggggaggagggaggggagggcagccgcccgggaacaggaccacgacactccccacctgcttatgggttctccagagcgaccaacagttctgcccataccctgcccaaaatgcccatgccagctcctccctgtgagcaggaacaggcacttccctgattcacagagtgggccaggtgggtgggggaagcggcggctggcttttctctaagtgctgcaatgcccaggaagaatggggagcaacaaggctccccaggtcccaggaggtaacagtcagggagggcctcaaggcctctcaggctattcccccataccctccagacccctctccttccagccagaaggagcctgcatgagcacagggaagtagtggcaaaacttgatgctcctctcccacaccctgggaggcctcagcagggtccaaaaaagggaagcttgaagagaactgtccccaactcagaggccagccaagaaggcaacactttccaagggaaagaggctggactgaccctccctcctgcttctcagcctcctgccccacccagagaacactttctgggaagatagggttgcccctatatcccaaggggcccactgtacccatctgccatccaagcacagggctcctcaagagtcctgctgccagatggtcatgctggccaggcctaaagaaggcagtgatggcagtgagggcatcaataacaactgttattagcaccactatcaacgctaccatttatggagcacccaccatgccagggaccggcttggagcattatctgtatcatttctaatcttctggttacttaaaacccttattaacccttatttgcaattccaaaatcccaaaagcccccccaaacaaaatatttttcttaactattttggcggcaaaacctggcagtttatcctctatgcccctgtagtgtgaatattcatagattttgctttggaaatattaatgtttgttacacgttgttgctcattatgtatactgtatggcactaaaatacaaagattactaatttccaaaatactgccacacccagggtatcagagaagaaattttggacctgtattatccccactcaacagaggaagtctgagatgggactttgctgaggtcccaggggatgagtggctgggaatgcaagcccagatccctgacttgagaaaacagtctttcctcctggaactgatctgctgagactctgatcctcgggtttgggtctcaggcctcaagctggcgccatgtagctggggaccaggccctgactccctatggcaaggccaacatgctgcttagcagtttccatcccagccgccaggccagagcccaggcaactgcagggtccgcattgggttagggaaagccatgcagcccctgccggccatcagcacacgaccctgggcccagcctctcggtcatgcggggttcgctgaggtcgcttggggaagccggctgtgagggtgcctggcccttgagctagggtggtgaggggcaggagcggttagtgacacactcttgtacctcctgcttcacaccagggactggtgacttggactgctgctctccagtgaggtctgacttcgggccggtggagcctggggtcaccagctcttccggtggggctggggagcgctgcttctttggggcttcaggcttggctggggatcctgctttctcaggggagtctgcccagtctggggagcctggctcctggctggagggcttctcccccttcccagaagactgcttgccgcgggccttgtgctccttgcccctgccccgagacatcaggctccgcaggcccagggagagctcatccttggctgcctccttcttcacttcaggcttaggcggagcagggggaggtgggggagggggtggcggcttgggactagaagctgccttttctcccctcttgcttcgagtcgggtgctcgggggacttgactcctctgcctggggtctccttggcattcccaagctcctcgctgggcagcaccttactcaccaccttcctcactgcatttgccacccgcttccgggacaggccctgggcctcttcgcttaggccttctgctgtggcagctcccgggccgttcatggcgagtgtgggtgcagggctcctggctctctgggaagtctctgggggtatcgggctggtgggaggctgaggactcctagatgggccactgccttcctttgagctgccctctagctacagtcatacaaatacaggtagacattagcatcacccctgcagccctgcccatcccatgcagagggaataagaaggtgtgacctcacgccctggaacagatctcccattcatctaccaagcaacacatggctccacgaggctaccccaggaagcccactttccatcttacaaataggacaactgcagctaagagtctggcttctttcccacaaagcacaatcagcacaatcaggtactactgtcacctgctgtctatccccagacttagcatggacctgtgagatgccggcacagagcgccgagaggcctatgaggtgctctggggttactggctttgtgtcagggcagcaaccaagtcccattctaggtgagcccactgcctcgcagcccagacacagcagagatggagcatggacacagcagagatggagcatggagaggtcaaacagccgagtcccacctccattcctaccaccaatcccaggcctaactccagggcgtcctgacctttgtagtccttggtccttccatcacctgttttccgggcagtcagaccaagagcctacccatcctgaaggaaaaaatgatcagggagctcttcctggccccaagacatgccaggcctcctcctcacagcgtccctcgtctgcggccactgtctgcccttcatctatgttctcaagcactgaggagcccagcacgggccaggaagcttccacttcagcctgctttctgccagtctccttgcagttttcctcctgcaaacctctcaagggtttggagaccccctagttcccagagtgtgtatagccctcaagcagcctcagctccaatcttccctggagtggactggtatactctagctggtgtgcccacccttcccccacacactggtgctaactgtctgggtcccaagggactgccactggaaggccaggctggctaacggcaggatagagtttcccataaagccagctccattgcctggggagcgtaagggcaacctgggttctccttgttggccaagcagagctctgtcaccagctgagctgtgcttgagtccttgttacccaaaacaatgatcttggttctagaacacatatgggcactgggctccgtgaaggcccacctgcccatgcttgcttggatgcaggaagacgctcacagtaggcgcacctgggagctgctgcctctggatgccacaaggagaagttgctccaccttttgagcagagctgagccaagggccttaatctaggccctggttacaggttggctccgctgaagggatagagagagtaagggcttgaaggtgcctcttcctcaacctcttaggccaagagtgctcaatggcatgccagggcactgcagagttggccagtggccctagccactggatcctacactcctcccctccctcttctggctttcctcccatcccccttccatcattaagatgatgacgatgggccaggtgtggtggctcacgcctgtaatcctagcactttgcgaggccaaggcagggagactgcttgaactcaggagttcaacaccagcctgggcaacatggtgaaactgtttctacaaaaaatacaaaaagtagccaggcttgatggtgtgtgcctatagtcccagctacgctactcaggaggctgaggtgggaggatggcttgagcctgggaggcagaggttgcaatgagctgagatggcaccactgcattccagcctgggtgacagagtaaaaccctgtctcaaaaaaaaaaaaaaaaaaaaaaaagaaaagaaaatgatgacaatgatgatgatagtaattggtaagacttacacagtactcactatgggccatggcactcttccaagcactttacatgtagtttttgcaaaaaaaataaaataaaataaattctgggcaactctgaggcctctcccacacacacacacacacacacacacacacacacacacacacacacacacacacaaccctttcaaatcacaggctggctttccaggattgtttgcagatcaggtggaagccacagtgcctggctaatcaaactgaccaaggaagtgcagggagccaggacaggcaccatctggggtaatgaagtaagaatatgtgttgtgatccagctctgccccagagccctgggcactcctgccccctgtgctaccagctgccctctcctaactacacatctttggacttggctattcagaaacctaaggctattcttgccttaggagagtccaggtttattcagggtctctatcccaatgcgctggggctggaggcagtgagtagctggagcctgcctccaggtcacctgcaccaagcagctgacagggtcttggaagagacagcagcgactacagtgaagtccctccatgcctttgccttgtgccacccagagcaggctgaagaatcccaacagctgagctctcattcgacgctccctgacctaagagtttgcccacccaagcctctccaggcccaaagggttcaggaaaccagaaccaaagggaggcaacttaaggggattggggaggaggttaggggaggtccccaaagcaccttggccatctccttcacacacctgaagctggcatcacatacaccgtactttcttcccctttactagaattctcttcagctgagccacacaggaaggggccccctgcaatccccacctactccatggagctgtctcacaggctagtccagggctagtgggtgcaggggcaaacacacacacgcacacacacatgcacgcatgcacacacacatgcccgcacacacacacgcatgcctcggagaactcaaggatgcacttacagccccttcctccttgccaggagagccaggctttggcagagttttgtcctcctctttaacctgagggagcagatgaagaagtcactggcaggtcaaggctgggagacccagcactaaaagcacagggagagaacattcaaggggcctccctcaccctgaggtggagctcctgagtctttaggaataccggggctaggggacctgggcaagagctatcctatcctagaatcagaactgttcagtgatgacttcaagaatgaagagtctgtgggggaaaaagccaagtacccttgccctcagcaaccagccactttgcccactttgggggctgtctaaagaggtccacccacagtgccatcgtggctttggttacgtggcagatgggaagatccagctaatttaactcatccaaactacaagagtcatccctagctcaggcaagaagtggtttgaacaaaaagccccagatctagtgactgaggaggtaaaagtaacccagtgtgggtacctgtgggccagcagcttttagagtagagtgaaggttggcccctactgggctggctctggcttacttcttgatcctgcacaactcccccagctcagctgagatcttgctggaggcagggagtggggcagaggcggagattcaggaggccagatattttctcaacctcagacccacaaaactgccaaccacgcagccgagggagggaaccctgaagttaggggcggggtatggaggaaggaaagatgcctaagctctggacactggggccaggggtttgtgctggagcccaggagctggctggcctgagtcagaggggaggagtggagtcgtggaaacagcagataccatcacacatctggaaaaagggcagatgatgtggaagctctgaaggttctttcagttcagaaactggctcacaacagattcagagaggccaggcctcaagttttaaaaagtcttctcctttcccctcaccagtatctctccctccaaaagctcaggcagtcctatggatttaatttctcctctttcccgcgtcacctaggactacaggaaaaagacagccctgttaccaaccctacctcctcctcagcgtgcctctccttcccagcacaatgtgggtaggagcatggcaagaagtccttgattcctaagggaaaaaatctttagaaacatccagaatcatttacatgatccacttggggggactctccaattttaaccagggtctgtggctaattttgagctcaaattagcagtgccaggggcactggctggcgtgatggctgctgcagttttaaagctgcatcttgtccacagagctatctgcaacgggctcaatcttcatagttagctcacaatgccaaggacgaggggaaatggcaaatattcaccagagtggagcctacttctttaagaattggaatcggagcagagaaagggaagggagggactggtggacagagggaggaagagtggcagggtctaggtctgtgcctgctgccccccaccaagccatcactctcccccttgctgccccagggatcacaccatgcagtagttctggggcacacaggttagtgggaggacaagtgttcgcaaaccacacagacacactcattactgcacgcagtgctgttaacttgggtgccggggtggcccagattccaagtccactctgtgttcttcaccagctccaaatctgtcctccctccagtggctcaagtttgggaccccaaatgtctggcccaaggtgtggcattggggaaaacactgggtgccccccaagtgtctgaaacactgggcccagctctgagctcagctctggatttagcatcaggctgactcactcctccctcccccatcagaagggctctggctgttgtaggtcactgcccagctggggactatgcacacgcataaaggcacacacacaggcagtcccaagtctgtggcctgaatcaccctctggacccaggtggccaactggcctgactccccacccttggccccttgtcctcctaacccactgcagcccccaggatcagggagacccagttccagcggtccctccacagcagcccacgttccaggggtgagtcaaggcagcagggtggtgggaagggtgtggaggggttaacccagagggacaccagcaggacaaaaggcagctcaccttaccagaggtggggcttaggggagaagcatgactcagtgcaggagcccatccagccagaatagggagttcaccagcccccgtcattctccctgccacccccaattatacacacatgccccaatccatctctagcttccaaagctccctctcccacaagccagtctcctgcctgcagatacaacatgccaagcacacaggaaaaacataaagattttaaaatccaactttccttttgctcccagaaggcgaaccttgatgaaaaggccatggcgctgaaggtaacctgtgccctgggtcagagaagaaatggggggcagggtctctcagtgtctctgagtcttcccaaaggccagaacctgccaggataaacactgtgggcaacaaggggaaaggagggatggagtggaggaggaaggattacaaaactcaagagggcattggagtaaggaataaaatattaaaggaaaatgaaggaaagtaggcacagaacatagcactccctacccttggaagctgtgtgcattgtttttatttttttatttttattttttgagatgcagtctcactctgtaggccaggctgaagtgcaatggtgccatctcggctcactgcagcctctgcctcccgggttcaagtgattctcctgcctcagcctccccggcaccaacacgcccagctaatttttgtactttttagtagagatgggggttcaccatgttggccagactagtctcgaactcttgacctcaggtgatccacccgccttggcgtcctaaagtgctgggattacaggtgtgagctgacgtgcccggccagaagctgtgtgctttgaataagccacttcgcctctttgggcctctctgtagaattaggggctagtctagacaatggctcaaggcctctccatgtctggcaccttaggagtctacgtggggagaggcactcaaactctatttatttatttatttattgagtcggagtttcactcttgttgcccaggctggagtacaatggcgtgatctcggctcactgcaacctccacctcccggactcaagcgattctcctgcctcagcctcccaggtagctgggattacaggcgcccgctaccacgcccggctaatttctgtatttttagtagagacggggtttctccatgttagtcaggctggtctcgaactcctgacctcaggtgacccacctgcctcagcttcccaaagcgctgggattacaggtgtgagccaccacgcccagccaacactcaaacccttaatacagtaaaccaaagttgcaggcctgtgacctaggagaggaattgaggaatctgcctcaggaccccagcgactttgccttccagctgtaacacacaattacgtggggcaagaggcccggagaactgcaaaactgtccatctatggattagaaaccagagctgggccgcttgaaaaatcaagtcagaatctgcctcagtccagggagaggctgcatccaaagaatcagggcacttcagtggagtttaataactggttctttttttttttttaattgagacagagtctcatctcactctatcacccaggctggagtacagtggtgcaatcttgcctcactgcaacctccgcctcccgggttcacgccattctcctgcctcagcctcccgagtagctgggactacaggtgtccaccaccatgcccagctaattttttgtatttttttagtagaggcagggtttcaccgtgtgagccaggatggtcttcatctcctgacctcgtgatccacccgccttggcctcccaaagtgctgggattacagaggtgagccaccgcgcccggccaagaactggttcattcttaaaactgcttatcatgaataatagttaaaaattaggaaatgttttgttttcaattaattatttctattttgctttgttgacttctgttttattattcagttaatgtgctagagactttaagtttgtctgttggtgtaattttaactcgtttgatctttgatctcttgttcaagttttcctacttgtctatagaggtcccatctggcccaggctgtgaggacaccgggccatttccacccaggcctgttcctctgcatcagctgttcctatgagcttcactctgaacacagatgtggggctctccccagaggaaattctctctgtggcttttatgcagaattgcctagacagttttcctctctcccttatcactgaatttgtttaggatcaagagcaagttatcctggaactggattgtttataacccaaaggataaatgcttgagggggtagagaccccattgtccattgcccaagcacatgcttgtttctcaatgcatgcccatatcaaaacaaaacatctcatggaccgggcgtggtggctcacgcctgtaatcccagaactttgggaggctgaggtgggtggattacttgagctcaggagtttgagaccagcctgggcaacacgatgaatccttgtctctaccaaaaacacaaaaaattaactgggaacgatggtgcatgcctgtggtcccaggtactggggaggctgaggtgggaggatcgcttgagcctgggaggcagaggttgtagtgagcagagatcgcaatactgcatgctccagcctgggtgaccgagtgagaccccatctcaaaagaaaaaaaaaaaaaaaatatatatatatatatatatatatgtaatgtatcccataagtacataaacctaccatgtacccacaaaaattaaaaaaaaaaaagatcaagttactgttatccaagacagaatgggtaaggaactcaggccccaaaggtggtggcagcatatgtgttgggaacatatggctctctggagcaagggtgtttagatctaaggcctctcttccttgacttgttctctctctagagatttcagccatttccagcaacattactgaatatggagcacctacaatgagatgggccctatacaagatattgaacatttattttctaatgtaaatcttacaacaatctgaggattggtgatatgggaattattattattcccattttatcgaggagggaaaagattcagaaagagattaagtcacaaagttagttaagtgggggaacccagacttgaacccacactggtctgcctccaaagcctgtgctgcttcctcagtgcccaccttttctggtatgttaggcaggcatcagctttggtagccaaatctggttgataaacttcatcggcgtgaaggttcagaagatctggtcaagccaaagcatggattgatagtgtgttttactagtgtgcaactctccaaatcgagtttttggatgtgcaaaaagggagaccccaccatgattctgccactctgcaggtctacccacctcctccctctgtggcacttctgagggacagcaagagagaccaaaactcactgaacacttactatgagccaggcacaggggaaggcacttcatacaggtctcctcattgaatcctcataacaacacactttctagataaggaaataaagaaggtgaattgccgagagcgctgcaactattaagtggcagagctgggagccacaaccagaatgtatcttggggagctgtttgtgcgtctttgtcatccctggactgtgattcacctctgagcagaacttacccatcttactcatcatactgtaggcgcttaataaatgttagctgcacgagagtgctgggacaggggttctttgcacaaacctcttattcccatctaatctcttccccaaatataaactacagagaacaacacttgcccattctgattcccagggacatggtacaaacaagggaggtataatctctaaacctgctcacaataaatacatagtgaactcaatgcctgggtttgcagggagggcaaggacactgaaattgcttagtagctcttcgtgaacaatagccacaaaatgcatcatcctctggcctacccattccatcttcaggaatgtatgtccagtgagctgacttaaagaaagaaaaagaaaaaaaacgcaaagatttttatagatgcactctatataacagctccaaattggaaagagcccaaatgcctagaattaagaaatggttaggtacaacccgttgttgtattgccatttaaactgacaaatgtgtggacaatgtaaccatatggaaagctccatataaaatgacatcaatcaaaaaaactggaacccaaatagtatacaaacagtgatcataataatcttgtaaactgtgtgaattagacacaacatgaacacctggtatttattttggtatgtatttgttacttactgcttatttttattgtgaagatggctaaatagtcaaaaaaaaagcaaaggagataatagctagaagcatttgttctcaaagaggagaaatccaagaaatgtactgagggactgtcaagcctcagccccaggaggcttctgacactctgggagcagctggggtttaccctccaccatgccagcagagcctacccgcccttaacctgcactctctgggcccctcacaggagggaatgggggcacaaatgctcctgggagaataatgccacgcctcaggcagcccctcaggcctggaatgcctggcctggacaaatgctttgaggcccaagcatccacaccagacatctgcacactgcaagcccccgagagcagcaggtaactctcaagagagtgcccaaaggaagctgagacgtagctggtggccgaggtcactttcccgcctcgccgcttctgacagcactcacacaccggaggcttctccttctgaggaccaagaggcagggcattctcctctcctccctctttcccattcagaggcacagagggcagctcccaggagacttcttcctcccagtcccaacctagcaccaacttatctagggattgagggcgaggaagggtggcaggaacaaaggagaagggaagaaatactagcataatagtaaaaaacggttaatcattattgagcatttggtatgtgtcaggtgctgtgctgaatccctcacatgaatcatctcatttgatcctcacaacatccctctgaaatagatactagtgtgactgtgtgactgctactttacaaatgagcaaaaggaggctcagaaggtcaggtgactcgcccaaagcctcacagcagcaagtggcagatctgggactcacactcaggtctcctgcgagagccctccactgctcactttaagggatggaggcacgccctgccctccatttcccctggttcacctgcactgttgtccttctacatcagctgccagaagagcagcttgggaggaaagcaggggttcccaatgatgacccgcccctccacccaccaacctgaatatgctttacgtggaactgcttgagaggaagggaagctctctaaggaatgaactgaaggccatgctgccagacagcgggggagggggagatgagcttggcagggacaacctggcccttgcagtccagcctccagccagagccctccccagccccagggcggaacagaaagcagccgggcacccgcctcactgcaggccagcccagaggaagcaggtgcactggaatggcttcctgccgcaactgcagttgcagaagggtcttggtttcctcctccaacgactgaacctgctggaggccccccttccctggggatgctcactgcccctctggagggcactttgctgtctgcttggatatcactgtgcatggccctaaatctgtgacctggtgctagtggcccgggggtggctgggggagagtaccctagaccaggaagcgcccatctctcagggtgaggagctctctctgacctctcccccacccccgggcatactgcccacacaactcagccctggtgccagtttgggggctgaggcagggcagtcctgagcacagagagatacaagtactcacgggtacatctcaggctcctgatgcacctccgcaccaggccagcccacgtactctgccaactgctgacacaactgaaaaccttacccttggtggctgggaggggtagagtcaggggaacgggaaggactgggagcagctatgtctctcctcactttcttttttaaggaacttacttatctggagtaatctctactaaaaaagagacttagggccagtcagagcatccccaacacgccatctgtgccccttgcaagtgtcctatgcacagaaatggaggtggccatgctaagactactcttggggacagcgagaagggtgctccctgacaactccaaggaccatcccctctcaaggaggaagagaggaaagagctataccagcaacaaagcagagacaagactaccgaggaccttgggtgctgtggggctggggctttggaagaaaacagtgttctaaggaatgaaggccaaaaaagcactaatggttggtggggaaggcgtgtcacagccttgggggtggatgcaaccccaggaaactgaggttcagaagacagtgcccctccaaaactcctgaagtcatgagtcaggcccaggatgccctgctcctagccacggaggggttttgaggcttccggggctgagtaactcccttcttaccaagaagctcggagaggagccccaaggctgccccacccctctccccacctacttcagccacatctggggaaatcacaaaaaggtccctcctttcctaaatgaggaaatagcatgaggagcctgggacatttccggggtggggggtcagagggacactcacccgcatggcctggcctggagcagcccagagcaaggagactccgctctgatgctgctctggctccgttagcagctcaaaatagcacaggctgtggccccgcccagttcccgccctctccccggcccctcccgtcccgagctgcccagccctagttggagccagcagcccggaggacttcgggtatcaggtatgccaggagggagagggtgatacagcagtgtgtgtggaagggaaggagaaggctcttagggtaaagccattggggtggggggcaggcagtgttagggggttagggcaaggacagggagggtgagacttgcctatggacacacaccccagctccgggacagctgggctgatatggctcctaaaaatagcagaggaatttgagacctgcagcccccggccccacaggccaagcttgagacaagcacatgcgcactcatgtgcatgtacacgtatacacacacacacacacacaccagcatgcacgaacattcaatcaacacagtgttcttgagaacacccaaatcataggcctaccctagccatctaattactgcggcagaggccaagacagccactaacgtcacatccaagacagcacacggggcccactgcacactgtgcccaaacagcagccgcaaagcagtcctgtaaggtctggcaggagcagagacccacacgggcaggcccacttactgccccactgccatcagcacacaggggacatgcagagaatcaattacactctctttgtttacatccctctcccctccacagacgccagggactgcacaggcagagaggagggtggggtgggcctcagccctgcagacagaggaagtcatgggtgtctagccaatgagtgatggctgcctgtgaaaagccagtgtttcttgtgaagagaaatcctggcctggctctccagttagcaccatgggatgcctagaccaggactagggacccgctgagacgctgaaatgggagctggagaacagaatgtcaaggggccaaaagacagggagagcaagtctcagaagccgtcagctctgcagaaaaaaggaaacagtcattgcctccctcttcctctttaggaaaaaaaaaaaatggggtgggggtggtgctaggaagccctgatacagaaccgcctcctaaccagtctggcatacaccccatgcttcttgcccctggccagctctaagggccattggttctatacattgtctgactttctccatgaaaagattggtaagcactgccagagaggatggaaacccagccctgcctcctacctgccatgcgctgtccaagtctcactgtcatatagtcacatacacagactcttaggacacggcgcttgtgtcctgctctctagggagtgggatgtccccccaggggaagcatctggcccttctgaagcacgtgcagtgtcacaggtcttcacatcttcagtggctacttagaacaatggtgccagcctcagctgctcactgaaatccactggggaacttgaaaaaaatactgatgcctggagcccaccctttccctctcagtttctgacataattggtctgggagcaggggcctgggcactgggatttttttgtttttgtttttttttgagacggagtctcgctctgtcgcccaggctggagtgcagtggcgtgatctcggctcactgcaagctccgcctcccgggttcacgccattctcctgcctcagcctcccgagtagctgggactacaggcgcctgccaccatgcccggctaattttttgtatttttagtagagacggggtttcaccgtggtctcaatctcctgacctcgtgatccgcccgccttggcctcccagagtgctggaattacaggcgtgagccactgcgcctggctggacactgggattttttattgataaaagctccccaggtgattctcacatgcagccaaggctgagaactgcaagactctaaggccagcataaggcctagcacagaaatgtccatttgttaaatgaatgagtgaatgaatgaatgatttagctgtgtgaacacaggcaggtgacttaaatttcccttatctgtaaaatgaggattacacctttactgactcttacccaaccagtatgagactggtacataatgtatgtgaaagggctttggttctccaagttctcaggccagcagcgtgggcatcccctggggacttgttggaaatgcaaattccaggaacccaacccagacctgctgaaccaagaactctggatatggggtgcagcatctgtgttttaactaggcttccaggtgatgctgaggcacattaaagtctgagaagcacggcttgaaaggaatgattcacagcataccatggttaggagtatgacctccagggccacacggcctggtttaatcttggctcttgcatgaagtaaactacacaacttgatctctctgtgtttcaacttcttttcatttgtattttattttttgaaatagagtctcactcactctatcggctggagtacagtggctccatctcggctcactgcaacctccgcctcccaggttcaagcgattcttgtgcctcaggctcctgtgtagctgggattacaggcaggcgccaccacgcccagctaatttttgtatttttagtggagacggggtttcaccattttggccaggctggccttgaactcctgaccgcaagtgatctgcccgccttggcctcccaaagtgctgggattacaggcgtgagtcaccatgcccagcctctgtgcttcaatttcttcatttgtaaaatgggaaaataatagcacctaccacatggggttattacatgggttaaaagaattagttcatacatagctctgagaacggtgtccagcacattcattttcaatacttaaaacaaaacaaacaaacaaaagctcttttgcccaggctggagtgcagtggcactatcttggttccctgaaatctccatctcctgggctcagcccatcctcccacctcagcctccgtagtagctgggatcacaggcatgcaccaccgtgccaccatgtaggttttttttttttttttttttgcacagatggggcttccctatgttgcccaggctggtctcaaactcctgcactcaagcaatccacctgcctcagcctcccaaagtgctgggattacaggcatgagccaccacatttggccttaatacattttaactattattatctacctatgatcataagcgggggaaaaaatgaggcattgtaagcaaaatttccaggtaactggagcctaccctttttaagggataaaagatttaagtcattttctaaattctatactatttataatcctaaaaataaccaacatatataccctgcttccttaagtacaacactcctaattcatctcaaagatctcacactctgagctttccttcttgaacccaatccatttctgctccatcctgtactgaagggcacgccatctccaccatgatgactcctgacttcctggcctggctacagcagcctggcttctgccccaccaatgccccagcctctctccaagggcaccagcccctcttaggcaccaccatgctgaagccttgcatatgcctatattaggaaggccagatgccctttgtggccatatgtctgctttttaattcttttgtcccctacctcattaggccatcagctgtcactcgtctgtcagtgtgcctgtctccactcagcttcacatgcaactacagctagtccctctgctgcccaaagcgtggtggtgcaatatcagggcatggtccatttctttgatgagtctaactgatggctccagaggccatgtggacactcccacagccagccaggccaccccaagcccctcagcttgcctccaaggacagctggaagctataatctggcccctcctcagactttactttcacttttctagtctcttctccctcttcccagccagcctggctctccgtcatttgcctgcccttgtcaccaccagagccattccttacgaatgtgtctctaccttggctgaccctctccatctctccaggcccatctcaactcctgcctcccttatgaagccttccctgaaacccaagacccacccggcaatgcaaagaacgtgggcttggcagccagacacacctgggtctgaatcccagcctctttcttgctgtctgacctaagggaaagttacttgacttcttagagtttctacctttttggccttaaaatagtatgatatccaccttatgaggctgttataagaatagaaaaggcagtacatgtaaagcaactgatgtgcggcctggcaaattatagttattaaattattaatatcattattatcataaaccatagcactcactgtccacacctgaacacattacatacatacggttcttggttatactcaatatggtgctctattatatacagtggagtcacacactatgtggggttagattccaaagtcagcacgtaaggcaaaaatagaatatagtccaaaactcctgaaaatcccttaaactgctcacaaagtatagtacacatgattttgagtatgccatttggtataatatagctgcaggaaagcataatagtcatgtacagcatatagtaaaaacacacaaaatattatttttataattttaggctacagtaatatagtttctttcacaaccatatagttgaacttattgaagtttactgtccacgtgccatgactatacagcataactaatgttctgaatgataatcgattcgtgttgaatgtttaagcctgctctccctggagagctgggaccatttcctacttcctttatatcccatcccgttccccagcactaggcacacaaaaggtgttccacgaaaatccatatggatttaaccaactgatctgaacggtgcacgcacaataaacgggctggaatagagtggggaacaaggggatctccatgtgtggtgacaacttcaactgctctgctctcccacattggtggcgtggatgagtggaaggtccttggctctgtttcaggcacttgaccaggcagagtggctaagcagagctgggggaaggccagacaggaggctctgagggctggaggaagtcgttcacttattcaactagctgtgaactgtaatacctcaaggcgaacactgtggggaagcaccgtgcctgcttctttttcagcttccccaccacagactgagcttcctgaggcagaggttgtgtgttgttcattgctctatccccagcactcacctagcactgggccctgctcagagacaatatgaggcacgtttgagtgactgagtgaaagaagataatttagttcttgttttcaactaaatacttcctgatttaaaaaaatgtacagatcagcagaggagataacaaatgtaccccaataattaaaattcaagtcagggacgtcaataacagtctagggaagttcagaggcaaagatctgttccagttacggtattaagtagacagcttacagacagcttggagctaggccaatgaaagagagaaatgttataatgtggcaatgaggtaggaagggaattccagggtgaagaagtagtgtaagagaaggcaaagaggggccaggcaggcgtagtggctcacgccagtaatctcagcactttgggaggccgaggtgggcggaccacctgaggtcaggagctcgagaccagcctggccaacatggtgaaaccccgtctctactaaaaatacaaaaattagccaggcgtggtggcatgtgcctgtaatcccagctactcaggaggctgaggcaggagaatcacttgaacccgggaggcagaggttgcagtgagctgagatcacgccactgcactccagcccgggcgacagagagagactccatctcaaaaaaataaaataaaaataaaataaaataaaaggcaaagaagtggaaaagcatgagatgtggacagtaagtctggaagaaatgtatgacacatataggaaaccaaggagggagggataaagctgggaaggaagctgggtctcaaatcaagcaagtgtgtgctgtagtggacatgtgttgtttctgctgcccaccacccattcctccatcctctgattatagcactccattttcccctctggggacccaccccagcacatgacttcgccctggccaataagaatatcctggccaataagaatatcctcaggctataggttcatggagggcatgtgacccaatcagtttcaaggatacataatgaaacttggggattattcaaagagtcacacatctctatccacacaactagaacctggggctgtgacattttgccattacttgtctgaggaccaaggctgcctagaagatggggtgagagacagaaaaggtcaggtcttggtcacactgttaatgtttccagataaggctgagcctgtagccggttctactgctggacttttcagatactggtgacaacacatatcttctttttaagccagttgagctgggctttctgttactctcacctgaaagagctgtacctgagatgaaagcaaggtgggcagtcaaaggaacaagaaggtacacaccaagcactagccatggccaggcacatgctactggttttcctctcaaaaccctgcgaggtaatgagaaggggaattgtggaatggggaaacggggtttacagaggttaaataattgcctgtgatcacacagattgtgactggccaggtgatttgaactcagattgttcagattccagagcccagctccttacacaccaccacctgcctggaaaacaatgggaggcacaacaagcttttggagagtgatggggcatgatttaacctgtgccttaagaatgctgagcaggtcaggcatggtggcttattcctgtaatcccggcactttgggaggccgaggaaggcagattgcttgagctcaggagttcaagaccagcctgggcaacatggcaaaatcccatctctacaaaaaacacaaaaattagctgggtgtggtggtggcatgcctgtggtcccagctacttgggaggctgaagtgggaggatcacctgagcccagggaaggtcaaggctgcagtgagtcatgatcacaccactgcactccagcctgggtgacagagtgagagaccctgcctaaaaacaaaaaacaaaaaccaaaaaacattctgagctaacaggatgcaagaggaggagaaaggaggctggaaggtgaaagaacattagaaagtcaaggtagtcaggcatggtggctcatacctgtaatcccaaaactttggaaggcagaggcaggaggatcacttcagaccaggagttcaagaccagcctgggaaacacagagacccgtctacaaaaaatttaaaaattagccaggcgtggtggcctgcaactgtagtcttagctacttcagaggctgaggtgggaggatcaatcacttgagcccaggagttcaaggttacagattacagtgagctacgaccatgccactgcactccagcctgggtgacaaaaaaaaaaaaaaaaaaaggaagtcaaggtaaaaggtgatgccaaatgagagataagaagggtctgcctaggattctggcagttgatggggaagagagggtgactcaagagaaaaaataagctggacttggtgactatttggggaaggatgggaaatgggcacaagcgggtctgggtggagattgagaaaagtaaggaaagataccaaggtttaaagcttgggaagatatattttgttaagatatatcttaacaatgagatatatatatcttaacaaaatatatcttaacaaaagaatacttctctgaccccatttgtccctctagttcccctgtaaatcaaaactcctaaaaaaaagtctataagcactgttgccataaatgggtactaattatatgatccttgtattacaaatttgcggtgtgtaaagtgtcaataatagaactatatttagggagttggggagagtcctgtttaaagcactcagagctcagggccaggagggcctggagcacttgcttttgaagtgggagggcccagccactagggtggcaggtgcacttccaggatgaccacttcagaggtcctcagcaccagccctagggccagtactagagtctacacctgtctcaaagaaaatgccagcgcaggagtcccttccctttcttgggaggaattatcctttattcttttgtgtgtgtgtgtgtgtgtgtgtgtgtgtgtgtgtaagtaacaaaatgtcacctcgtatgaaacagtagtgttaggagacagcgattggtattgaggtgccaagattttttatgaaattctaccagtgccgatagccagtggattctgaagggttatagggcagactccctttaagaagcctagggatggtctcagagaggagaaggagggctgagaggaaacctggagtgaccaacggcgcatgcccagggccaccccagccactcagcaccctacgcacgggtcaggctctgtgagggccgagtcagccccaggcccggggcggcacttcccgggttggcccaccggccagccggagcctgggcggggccaagggggtggggccaagcccagcacatgcgcctagagccctggaagctccgccctgcagcgccgctggcgcccagcagagggtggcagcccccttctcatctaccctcccgctttgctggggccgctttcacctccgccaggccggcctccaggccccacccccaggaggcgtcccccaggagctccggcccgagggggctgcggcggcaagatggcctctcgccgtccccaggacgcgtagggcaagaagaggcagggatgagctcggtgcccactttgtttttatcaccgctctatccccagaacctaaaacagttcctacatatagtaggcattcagtaaatgcttattgatggaataaatgaatgaatacatgaatgcaaggtcaaaagacgccaggaaagcctgttctagagaggggcttgtctagagacaagcaatcaggaaggtcagtgggtatgggacggcgagccacagatcactgccccagaggtggtcgccgaggcttggggctctgacactccccccagcccctacacccacccagtccctgcattggcacacccatcagtttgctcagagccatgtgccaccacaccttttcgggcacagagcccaagtagggacgcctgggcttgtcctctctgccaagaccctgagtcaatccccaaagactaggcaggcatatgcggccgactgcagggaccacctgactggcccgacagcaggcctgctgctctctgaggtctctcagctgctggggatttcctcatggcccccggggacttccaaattgcctctgctttgccaagctcccccaaggcccaaagccatgagccagccttgaggatcctttcccaaaatcctccacagccctgccccacatctcatcaggacttgggtcacttctgggtctcctaaatgtaccacatgcactatgttctcctatccaccccctctggtagacaggagggaataaacataatgaagcattgttctctttttcatataaatgacaactcttctccatttccacagaagaaaaaaaaggaagccagcttaagggtcagccacagcaatttaaataaaatatcagtaaggtcttcctgggtgtgagagatggaggcctgtggtgcttattctcaaagtcagagaagttcttctagacaagcctcaggttcctcgtaacactggacatccaataaatatttgagaatctgtgtgttcacctctggagcccctattgggcctgtttctaaaaccctctgaagtaaaaaataaagcacaaaccctatgtccatagaaacaggaagaagcaaaagcctctaccttgcctaccaacccaccacctctgtgctaacagcctgggccaaatccactggggcatgtgagtacctgtgtgttacaaagctgggcagaagacatccttggcgaggaaaggaagcgctgccccagttgtggtggcacacagccagggacctgctggccctggggcattaggattccagagctggtggtggttgaggtgtagaaattgccagagaggacagctcttccttcttgagaggaaggggaaatgccaccatcccctgccttaccagggggactctgaaggaggaaacaaaccttcaagaacacccaactatttctttctgggagctgtttagagccgtactgttcaatatggtagctactagccatgagtggctattcaaattgaagctggccgggtgttatggctcatgcccataatcccaacattttgggaggtctaggcagcaagatcgcttgtcttcctttgatgactgattttgaggtctctcttctgtgcctttgaaagaccctatagaggatcctctaccctttgtcccgcccattttcttcaaaatcccaaaactgtagctcttattgttgctgtagaaacagatgcttgtcaaacatgaagttggttggaagggctagttttggctgcaggaattgctttcagctcatctggggaggagagaggaggaagaaaggaggagagagggggccccaggcaagggcccacaggtcaggagttgctgtggttgcaaaggtgttgttaacacaagaccagcctgggcaacatagtgagaccccgtctctacaaaaaaaatttttttttaattagccaagtgtggtcccagcaacttgggagggggaggtgggaggatcactcaagcccaagagttcgctgcagtgaactgtgatggtgccactgcactctagcctgggtgacagagcaagaccccgtctcagaaaaaattccagttaaatggaaacaatgaggatacttctgattaaattaaaatcaaataaaatttaaggttcagttcctactaagttggatagcattatagaccatttctacccttgcaaattgttctgttgggcaggtctggtctagaggttccctttcagtgtgtcctggtccctctaccaatgcctccttcagatgatgcccccgcctacctgctgttgtctcccttcctcaccccagagtctgcttagactcctatccacacatgccttgccttgttccctaggcctccaaaagaggtggaggaggggactgtagtcacaatttaatacccagctgggagcagaagccaagactgaatggaaacctactcccaccccaaggcgtcccaggcctgggagaaagcccctcagtgcctgcacaatcacacaatggttccttgtttctgcattctctgggccaagcacgagtaagacatctggaatgcagtggcctgagggcttccccaagccacccgctgcaggacttatctgatgttagtactcctatagaatcagaagtcccaacagaatcctgaactttcaacagcaaataaggccaatgaagcctcatccagggcatgccaggatttctgccatggagcagtgaggcccataactggacacctccctgtgtcaccaactagatgaagcaaaggaggagtaggaaggggaggacacggtggagaatggactctggacatatctgacatgctggagaggaggctcagagaagccccccagccccgcatccacagaagagcaaaggaacagattggcgggtctgaccactgttgtgttccgtcacagagacttcactggagaggttttgctgcagtaaaaatcacaagtgggagagtctaggcatgctcatatgggtggtggaaggagcagaggacagactctggaactggcaggtcaggactgtctttctgttttatgcctcaattcctgcttagtcctaatctaaatgggctgtcaggagcaagacaggtgtgaagaaacaaaataaattgtagaaagaccaaaaagtagggtgagtttgttcaaatggaaaacaaataggtagaaagacacctggtactccagaggtcttgccatcagctaagaatctgactggagggagtcacagagaaagcagcccaattttaaaaactggaatcaaacttcagaccagattggaaactcaggccaaagcaatccctcgctaagattactgtgcagccctgagtaagcttaggcctgttccccatctctacctgaaaggcactttgggcataagcatcagcgtggggacaagaataaagcagttctccaacactccccgtgagcagagctgagccattaacaggaacagcacctgtgacattcctgcgggtaccaagctaccaggcaccagtgcttcctgacgtaccagagacagattaatgaggatgatgataatgttcacttcttcttttttttttaaacaggatctcattctgtcactcaggttggagtgcagtggtgtgatcatggctcactgcagcctcaaactcctgggctcaagcgatcctcctgcttcagcctcctaagtagctaggacaggcatgcaccaccacactgggctaatatttttactttttgtacaaagtagcactatctttcgcaggctggtcttgaactcctagcctcaagagatcttcccatttcagcctcccaaagcactgggattacaggtgtgaaccaccatgcctggccaatgctcactgactctaggcactattttgaggcactgctctaagtggtttatatgtattgattcatttaatcctcaagacaaccttacaaggaaagtactattattttgtgtttgcttgtttgtttgagacagggtcttgctctgacacccaggatggactgcagtggtgcaatcacggctcactgcagcaaactcctgggctcaagcaatcctctcacctcagcctcttgagtaactgggactacaggcacacaccaccatgcccagctaatttttgtatctttaatagagatggggtctcaccatgttgtctgggcttgtctcactatgttgcccaggctagtcttgaactcctgggctcaagtgatcctcctgcctcaaccttccaaagtgttggggttacaggcatgaacaaccacactggactaaaactactatgattattctcatttcatagatgacgaaaatgaggcacagaggaattaaataatttgcccaaggtcactcagccagtaggcagcatggccaggattcagacccaagcagtctggctccagaggccaagctgtagccaatacttagcaatgtgttaacaacaccttcgcaaccacacacaactcctcacctgtgggtccttgcctagggccctctctctctctcctcctctcttcctcctctctcctccccagatgagctgaaagcagttcctgcagccaaaactagtccttccaagcaacttcatgtttgacaagcatctgtttctacagcaacaatgagagcagcagttttgggattttgaagaaaatgggcgggacaaagggtagaggaccctttataagatgggtccctctttcagagcacagaagagagacctcaaaatcagtcatcaaaggaagacaagggggctgggggaggaccccaaagccctgattaaagcaggaaaactgattcccctaccccagagacaaagtcctctggtgcgaagccagctgctttcctctggacagagaaggtaagggctagaagcaaatggcagaaattggaggggtctgggagaaaaggacaacccactctaaattctgcagagtgtgtgtgtgtgtgtgtgtgcgcgcgcgtgcgtgtgtatgtggcgcctaggccattcctaagctgggtgtcctgccacagaacccagttctgtggttctcttccccaggtcgaagttaggtgatgatggatggaggcaagagtgatcaggcagccctgggagaggcgtgtagacaggcctcagtgtgcccgcacagggtggctcacctccctcgagggagggcaagggcatttggggtgaggtggtcaggctggtacccctaggagaaggcttcattcctgcctgcccctcacctcatctaagcaagaaaccccttttcttgttcagaaatcctgaggccagaatctcaggctgccagggcaatcggggctctgccaggcaaagccaagtgctaaggggaatagggatgtttgctggtcaccgattccaggaagacaggccacagcagtccccccaggcttctcaggcagggggcccagtttccctcttgcctctgttgatcttgaggcatggccaagtgagtggggactcgacccagcctgtgcccgtgtcctttagggaacctaggtgcctgctgagaggaggcagggctgtgccaggctcagcacatgctgggttccccccatgcctgaagtgccaggcacactagctcccacagcctggacagctctggggagggcgaggcagaagatgccagcccagccggggaggaaatcttttactgctctgagcccagtgcttctgcaatcagctccacaaccaaagcagtccacacatgagggaggggcaggggcatgagggaagggcccccagcaggaagaactaaccacacaaggagatggtatcagacccttcccctcgccatgtccctggaaggttctactggaatctctagatactttccccttgatgtgttggggccgggcatgaaactgggtgtcacggagagtcatgacagtctcacgctgcctgacggtgctgtcactgcctggcctctagcccatgccacccagggctgagatagatcttcctgcacacgtcttctgtccttgcagaagcacaggctccatcatcacagggtgctatcttcagcctttcttctccacagaaccaggctcaggggctgacagggagcagtgttcatcaaggtgtcctgacgtcccaccctgattgcaacaaggctctggggacatccacatctggcctttcctacagcacagagctctgcctcctccccaccacacatgcagccctcttctgccccagggccggggcagcctcagtcctgctgccagagaagagctccatgggaagaacctgccgccctgtgtggaccctgcttgccccagggcctggcagtgagaggtgctggggagggagggaggaagtgagtcagctccctgcagaaatctgagtgggagggaggagccagcagaaatgagatcgggggcaaagggcacaggagccagaaaggtcactaagagagggaaccaggccccgaaggtgttgcgggacccacagagtacaagacagatacaggtgatgaattcggcagggccacctccaaccgaggctgggtggccccagtaggccagagaacctgggtccagaggcctggccccacctgaggatggaatccgaggcggctcccctccctgactcatgttcacaccagaggtagcaaggccttgtgggacatggccagcctcattctctcctcagagatggagtctctgggctccaaggcctcccactccctctcctgagccctacagctccagaagcccaggttccccatgacctggcctagtagggacatgctaaggtcctacagacaagtcacctaggccagtcagagcgggaaggttccaggaaccaaaactgtctcccagaggggatgggagctgagcctgggccccaggagcagagcaactggggctgccttagcacccactctctcctccctggtagggacatgtgggagctgtccccaggctccagctggaatccattgctgtgactgggtaagatccttgctgtgaaaattcccatcctgctgacattccagtatgaaggcagttcagggagagcagcggaagggaagaggaagccccactgggccacattccagcccctcagagacctacagccagtgagacaggcgcattcctccaaggtctgagacagacactgcgtagcccccatgtaatcctgaatcttcttctcacccaagcctggcaccttcatgtgggctcctgtgtgggggcaggaggcagcctgtccccaggacctcccttcccaggctcctgctcctggatgcccacagagctgcctctcctccagtcctgtgagagatgccaggccccaggcatgcaagaaacagtccatgggtggagatgggacacgctaaggtcctagagacaagtcaccaaggtcagttagagcaggaggggtccaggacccaaaactgagctaaagttttggttctggtctggaagaccgaacagagagaatgagaaaccagttcctgagtacagaaccatctctttccttcaacaaatatcccctgccctcatgcagtgctccagcactggagaaggaatgagataactcagtaattaccatcttgtgaatgctatgagaaggctggggtgttgccaggtggggacctgacatggtctgggaggatcagggacaagtgatattcaaactgaagccaatgtgtagaagtgtacaagggagggcagggaaaggggctacagacaaaaggaacagcaggagctcaagggtagacgccagtgagaagcctgcattgcccccaccactgctaggccctctgccaggctgtgctccgccactgtttttccacaacacacagaggaaacaacagcgtggccctgagcaacacggcgagcccactcttggtcagaggtgacactgcagggatcctgtcaccccaagtgctatggagatcagcactagcatgccagtatgggccaaaaaggtgagaggggcaacgtcccagactcccagatctagcatatggccctccactcctggggaccacatcaaatgctgccaatgtaggtgccacttctcttcttaaggcgtccctcttccacccttccctctcccggctcccacaagattgaatcctgcctgctgccacttgggctcacttcctctggctaaccctcaggagacactgagagcaatggtcacacccttctgcagcacaccaccacagctcaagagtggcccatcactcctggtttccttctggaaggatgacaaggaggtgaagaggcttttagtgacagggcagcaggagtcagaaggtctgagctaggcagtggatttatatggatatccggatactgccttgctctcccctatacagcagactagtcaagagctgatggcctgagttcaagtcctggtgagtcacttaatacctgtgcaaccttacacaatttgcctaactttaacctctcagtaatgcagtttcctcactttaaaacagattgttatgatccttcaaagggttgttgagaaaattaaataagtgaatatatgtaaacactgagaacagtgcctaacctacagtgaatgttagacgtgatcctcaccttgccagaacttttcatgcccttcccccaaggcatttctgtttagttcagtcttttttttttctttcgagacagggtcttgctctgtgtcccaggctggagttgagtgacataatcaatggcataatcacggctcactgtagccccaacctcccaggttcaagggatcctcccacctcagccatccaagtaactgggactacaggtgtgcattaccacctctggctaatttttgtattttttgcagagatggtgttttgccatgttgcccaggctggtctcaaactcctaggctcaagcgatctgcccacctcagcctcccaaagtgctgggattatagacgtgagccactgtgccctgccttggctgagtcttacccagatcaattaaacaccacctagggcacgtgtctacactatgcaccatactgagcgccacagataacacccggcgaacacccggcaaacaccgacatcctgccctggcccagagtctgtgcaaagcaaccgggctgagtcgcaccagggcagaacaccatgccctgattctggagaacatatggcgggagattaagggagcccgaggggtgacccaggtctaaggaaatagtttcccaaccaaactagagcccacaactgaaaaaataagctttgctaacactgtcccctgtatttaacagaacagaagctgctgccaaacaccatgcgggactcttgaattggctgccccccatcaaactgcacagcagaggtgggggccctgaaaactccgctctttcgcagtggctgtctggcatggtgggcgccctcagtgctgccagatgcctggggcacaaccatacccgctgcccaggactgacaatggaggcgccaggctgcctgcccaggcagcaggggagccctcacctcagctgggtcaccagtccccaccgtccccccaagactgcagtgagtagaatacagcagcttagtgcattggggtggcgggagccctgctggcaggcagcgcgtgcctgtggtttctgggaaatgctgtagagatttgcagcatttttaaaatacttgtgttcccacccgccacacactccccttcaccctactccccactcacccccagtcagggtgtttgcatatctggtattttccagaaccagtccaatgtaaataagagagattagaagggagcagagggcagggtgacttggggtgtcagggcaggcaggaagggaccatgacaggaagaggcaagggcaggctacctttaagaccctgcccctgcaccaaggctccaagctgtgcccacagaagcagccatgaccatgtcatgtacccatactcaggtcagtgcagcctgggcactgtgcccaccacccacaggctggatggccacggtactccagggctgcaattcatcgagcatctcataaggaagaaggcagaatggtgcctccaaggacagagaagggagccctggaaatgatctagtccactgcttcgccctgacagtcccctgcatcccactactccacaatagacaatcccaaagacctttcacccaccacgtcccatgcccttgacacctgccccctgcccccagcccttcattacctaaaggacttagatagggtccctcactgagccctcaagccaggattctcacatggcgagactcagatgccaggggtgcctgaagctttggcacaaaatgaagacaaatttcctgtttttaaaaacaaaacaaaacaaacaaaaaaaacagaaacagaaaccaaaaacccaaagcaaaacaaaacaaaacaaaaacgctccaaggatcacttgcagtaaaatcaggaacagaagcattgtagaacactgagccaggcagcacacagctgctccaccaccaccagaaggccctaggaaagcccagtgctccaaacccggcctggcagacctggaggcaagaccattttgagtcttcccttggaatcctgcaggccccactcctggcagcagccaggtaccctagggacaaggttgatgaggctcatacagtttctacccaggggtctagggcttcccctacagcaaaagggctctcctgtccttctcccagatgcaggcaaccctgacttgcccatctcctgcagggccaccaatggccaagcctgcaggcccgagaagctggcctctaataagctagaaaaggataggaagcacccagaaggccatctctcccttcagatggcgtctataaggctagggctacaggaaaatccagacgaaagcatcagaaaacctcaggagcaaggatgggtgaacactaggatggattcattaaagaagctgcaaaattaccctcccagggtggctttagagactgggcacagggaagggaagggtactaatgtttctaagcatttaccacctgccaacatctcacatacgtgaacttgcctaacataaacatgcttaccttatataaagacccacaaaatatacagaataaaaagcaagtctcctttcagcctgcaattctattctgcttctcagaggcaattggagtgaattcactgggtatgcatctttctccaacttaaccttctcaacctctgggaggatagaataggcctatttcatagagatcacaggtcaccttcaccaggaggcctctcctgattgccccccacttcccccaggcagaacttcctcctgccccactgtatgcctgcacagacttctgcgatagcagctttgcatttctttacttaggtctatgcttcctcaaggaaagattatattttgtttatttaatcccccagtgctagcacagtgcccggtccttaggtcaacttcattaaatatttactgagggaaaagtgaacactgaggctctgaaaggtttgataactttggtaaaacccaaacccaggtctttctggctccaaagcccatgctctttccactgtaacatgtcctctcccaaacccacctgagcgtggaggtggtttatgtgaacatggcaacctcatgaggaacccgacagcctgaaagcctttgactagaaactccaccccacacactaaaacctccaactagcagcctcacggtccaccaggagaagtacccctaccacagcgactagacttggctgggagggagtggtaagccttcctttaagaccccctctcccttcccaccacattctcaaaagctcagggagagccaggtgtagtggctcacgcctgtaatcccagcacttgggaggcctgaggcaggtagatagcttgagctcaggagtttgagaccagcctgggcaacatggtgaaaccctgtctctaataaaatatacaaaaattaggctgggcttggtggctcacgcctataatcccagcactttgggaggccgaggcaggtggatcacctgaggtcaggagttcgagaccagcctgaccaatatggtgaaaccccacctgtactaaaaatataaaaattagctaggcgtggtggcaggcacctgtaatcccagctactcaggaggctgaggcaggagaatcgcttgaaccagggagacggaagttgcagtgagctgagatcgcgccactgcattccagcctgggtgacaagagtgaaactccatgtcaaaaaaaaaaaaaaaaaaaaaaatagccaggtgtggtggtgtgtgcctgtggtcccagcttctcaggaggctgaggtgggaggatcgcttgagcatataagccaagatcgccccactgcactccaacctgggtgacagcaagaccctgtctcaaaaaaaaaaaaaaaagaaaaatgctcaggaggccttgctttctggccagcacctctggctctccatggcaggacaaccacattggccagggtttagctgggtgggcttttctgagctcagcagaaaagtcctatactcccagatgcaggaggacatgcctcgtcctaagggactccatttgtcctcccctagaatggaccgactgaggatacagacagactcgccttctcctctcccaggccctagtctccagcctggcctctgccccttctcaatgggccttgactttcccatccggacttatggaagtggaggagggaattttgatccaactggggttttgagatcctcaactttaccaacatctcccctaatctcaccagacttaggaaacacttggccttcagcaaacttaagagtaactgatccaaatacagatgccccccaagaactttccctaaggaatcaaaggggaaagaatgtagcatcttcccagtactctggcggtcacatgacccctcctctccctcaggcccctaccagtgggtcaccaagaccccagagtctgactcagttgctcgagtctgagatggctctccatcccactgcctctacctgagtccaggtctccatccattcttctaggatcacaatcactccctcaccactctccccacagccaactttgctacaccctagagcatgctccataagcagccagagtgatttcctaaaacctgttcctattgctccctgattaaattgcttcagtgccctttggttaaagttcacgttccccagcacggctcacaggggcctccatgacctggctcccgtggatgcctcctagtgcttctcccagctttcccttcccacacaccgtctcccagccttattcctgaaatatgtgattctctctccataactttaggccttggcatgtgtttgtgacagtgtttcccttcctcttgcctccgcttcactcatctactacccagatgtcagctttcgctgacccatccacaagactggacttgaagcccctctgctgcactcccagcaccaggactggcccctgtggttgagcttctcagagggtactgtcatggtctgctactggaacatctctcccgcttactatgagctccttggggctgggattatgtgctgctcaccgctggagcccaggacctagtatgcagtaagtgctcaacaaatgcttccctaatggatgggcaggtggaaggatgatggcagaagaaaacggtgttctcccaggcctgctggttgatttctaccaggccacaaatctaccctaccactgtggctcacccctgctcccagcggaacctcatctagcagctaccaggacacatgaaggtgtgaacccagcattctggacacacgccatgtgagagggaaacccaaggggctgtgtctccctggggccttctaaacaggccatggagaggagccgggggcctggccccatctgtgtgcaggaagataacagatggctagtcagctccctcagagctccctggggacaggcaatgtgtggacacagttgatggatggcctgatggcagggtggccagcaagagctgtccctgtggggctacagtcatcagggtatccctcccaggagtctggaggaggcgggaagacttctcttggcgcataactgggattagaactgctgccaagacagggagtaggaggagtaaaaggaagaggaggagatacaggctgagggtacagaagaggtgcagcaccccacgccactcccagccctgtcccaggaagctggaaacgctgggctcaccctggtcctctctgcttgtggtatgagtccccaccacctacctgggtgagaaaagatatgggcttctttcagccctatgtgtctccttatcctgccacatggctctaggagatgcatggggatggggtttgctactgtgtcctctggcagatgaaacaggctgaggctcggggaagaagtcctctgggcaccagctgggcttaccccataggagctagagtgagccagcatttcagggataccagctataacttggaatccaccagggcctccaaagctaaaccatctacttccccagggatgggatagcagcagatagttgggaagggaaagctaggaaaatctgagatgccaggatgatccctgtgctataaagagaaaaccaaacagcatctgggatgccaggcccagggccccacagaggccttgctgtggttcagcagggagctggcaacaatcccctgggggattcattctttaagaagaaaattccatctgttaaaagcagcgttagcctggaagaacgcagacaggcatggcaacatgttagtctttgcttctgttattgtttttgagacagagtttagctcttattgcccaggctgaagtgcaatggcttgatctcggctcactgcaacttccgcctcccgggttcaagtgattctcctgcctcagcctcctgagtagctgggattacaggcatgcgccaccacgcccagctaatttttgtatttttagtagagacaaggtttcttcctgttggtcaggctggtctcgaactcccaacctcaagtgatccacccgcctcagcctcccaaagtgctgggattacaggcgtgagccaccaccacccagcccagtctttgcttctgacataaagacccctccttgttcttccctctctacctcgtggttctctgagttccacctaacctggtggctaaaacatagtaggtgctcaatgtgtgcttctggaatgaagagtccaggtcttccacacaggcctcctcctcccattcactacccttccctgactagcaaagctgcctaaacccagctagctccgggttaaaggaaggcctggaacccaactacagtgcttcctgacagtctgaccctaccactgccagcccctcttcaggcccaaggtactactgggttgagtagcagctgcttcccctccctgggagaaagctgggaccgggactctgcctgtttcctcccattagcacttcctcccatttctgactttgacacatctggctggtcacttagtaccaaaaggtcctggtcaagcagcaggggccagatctggacggtcctaaaacccacagctgggaagggaagatggccagaggtggtcacttgtccttcgtatactatctccaggcaggacattcaaactgctatgtagccaccctatcaaaagacccctgggattagtgagcttgatgccccatggagatccgctcctccatctgatctaaacctctctgctcctgtgcctcctgctgctctttttgcgcgggcagctggggtctcagtgacagtcaggacatactatctgtgtaggttttatccctcttgcttttccaggtccatgctttttctccttccaggagaggtaataaagactcttggagcccaagtgaccattataaatcagatccagttactcccctgcttcgaacccttcaatagtcccatttcactgggatgaaatctgaattccaactgtgacttacaaggtcctttatgatctgcccctgctttctctgcagcctcacctgatatttccttgctcactcaggggcaagaggaggctctggcctgaggtcatctttcccaaagatataatcataccagctatacatctcagatgttccatgacggccctaatttgaaatcatttgtccttttttatccccaagatctaaataccatggaaatattgtattttactgtccagattgtctcttatatctggaagtgacacatgttagcctatacaccccaatttagggctcaggaaatatggtgcccaaacccctcacctgtccttgtaatgaagaagctgaatactttcacggtaattactaaccaacagcagagctctctcaagggctccagggctgaaactaaggttcaggcagagcttggtctatcccagcaccgttgagaaaggcattccgctgaattcagttaggtcaatccaacagacacagaacacaggagggaaccataaaaccatgaggcctggccaaactgctcagaattctactgcagtgaacctttggggacttgtcctcagctcccagacaaggttgagagacgaaggtgtgactcctttaatgtccttgtctttcttcattaggttaaacctggtgggggtgctgtttgtaggggtggcacccccagaggattatgagcatggggcaccttctcctgagttcatgcttccccacaggctcagagagcagcagggcttccccacttacacactgctaggctctgataacagctcttgggtaccccgattacccagtcaagcaggaggtgcccacattccccatccctgcttagcccaggtgcccagggaagcactcacatcggatggctccctgcgaggtccctcgccgctccgcagccagctcctgctgagctcgctgagctctggaatgggctgcaccttgagccgcacgctgtcccctgactgccggatcatctccacaatctcatccctggacttgctctccacattgtgcccattaatctccaccagtcgatctcctggcaccagccccagggccaggtccttggtgcctgcaccaggctcagcaaagtggaccacacgccgacaggcctggccctcggggccccgatccagcatggttgtgcgccgcagggagaagccaaagtctccagtgggccgtcgttgcagctccagctcccggagggtaggtgggggcaggggcaccacggggggcaggcgcaggtcgactgggaactttttagtcactagctcaggggctcgggatcggtgccctggtcgagggatgcctgggccaggatgctgcaccagctgtccctctagagtcctcacctccacctgtggcgagggggcggcagagtgctctgagggcgtcgaggtttctgaggcgctctcatcccggctacgctgggagaaggaaaagcgcttgacaatcatctgtgagttctgcttggccagtgagccgaacttggctgcccgctgcagcaccgagccacggaagctaccctcctcacccttgaggtcatcgctggagctggctgtacttaggtggcccgagtccaggatgacgctgccccggttactatcggagtcaatgtcagtcaggtgcaggtcagagccgctggccaccttgatggggatggggttggagatttccaggcgcgtcttggattcacgcttggaggagcggttcaggttgaagaagccacgtcgcaggctcatctcctccaggctccgaagctctgccgctgacatccgctcctttttctcctttttctccttcttctccttccgcccgccatctttgtccttgtctttcttcattaggttaaacatggtgggggtgctgtttgtaggggtagcacccccagaggattatgagtgcttagcacagggccttggtgccccactttgctgctgcaaacagaaacacacagagagaaaggttattcgaacagagcctcatgtgtctccagtccagacataaccaaatgatacagctactcctcactgggtgctagctatgtgccaggcactctgccttacccaatattgtctccactgatttaatccttacaacccttctataggtagttactattattaccccattttacaaataaggaaacttaaggtttagataaggcggtaaaagcccagattccaaaaaggcggtaaaagcccagattccaaagcctgtcatttccttgaatctttgatagaccaaggcttaggtgtatctggaggtagtatgtgggagacctgacctcctggtgagagaatgcttcaaaccaacctgggacctgacttaaagattcaaacacaggccaggcagggtggctcatgcctgtaatcatagcactttgggagactgaagcaagaggatcgattgagcccaggagtttaagaccagcctggacaacacagtgagaccctatctctaaaaaaaattttaaaaattagccaggcatgctggtgcatgcccacattcctagctacttgggaatttgaggattgcttgagcccaggaggtcgaggttgcagtgaactatgatcacactactccagcttgggcaacagagtgagaccctgtctcaaaaaaaaaaaaaagattcaaactcaaaggaaaaagaaaagggactcaatgcaacatcacctcccacagacaatgttcgtttaagcaacagacatcccattctttggactctttcctgagcctgttatccctagagtagcacccttagccaccgcctaacagaagaactcaaaggaaccaacatttatttaatgactaccactggctaggcctaatgccaggcactttacatgcactatctcctctgaacctcacagcattcctacaaggtagatatcattatttccactgtacaaaggaagaaaatgggatacagaaaattaagtatatgttagttgtcacacagctaataaatggtgatgttgggattcagtggcaaatattgtgttctttctagggcctgggtgaccaaagtaaagcagcaagagaaagaagggaagttccagaccaaacagaggatagacagctgcgaggtgggggtggggtagggtccactggataaacaggatcctaaaaaattcacatccttttccccagaccaacacctaaatatagccccaggaagaaaactgtggtagcctgaaagaaaatcccagccccagggtgtgtgaaacctacccaccaacctacccaaccccctgcacatctaactggggacaggaccaataaaaacctggtgggaagagttgagagagtctttcttgttctaaccagcagggaacaagaagaagaaataggccatgccacctaattggaaattaaatgacattttttctctctctctgaaagcctacccctctgagtttcacacagaggatctacaagcttatcccttctagtaatggcctcttgccaggccctggacaggcctttcctctctgtgtgctccacccctacaaccaagcagggccctccgggatccccagtctactgagagggaccatccttcaaccctggtacaatgctcaggaaggcatcaaggtcagaaattcccaaaggccgtagtgcaatggctaattgcttccccctgcccagcatcctgacttgtgttgctcctgacataccaactcatctcctttctagagcagtgctgtccataagaaatataattcaaggccaggtacagtggctcatgcctgtaatccccaatactttaggaggctgaggcaggcagatcacttgaggtcagaagttcaagaccactcatgcctataatcccagcacttcgggaggccgaggtgggcggatcaccagaggtcaggagttcgagaccagcctggccaacatagtaaaaccccatctctactaaaaatacaaaaactggccaggtgtgatggcacacgcctgtaatcccagctattcgggtggctgaggcatgagaatcacttgaacccaggaggcagaggtggcgtgatctcggctcactgcaacctctgcctcccagggttcacgccattctcctgcctcagcctcccaagtagctgggactacaggtgcccgccaccacgcccagctaattttttgtatttttagtggagatgggttttcaccgtgttagccaggatggtctcgatctcctgacctcatgatccacctgtctcggcctcccaaagtgctgggattacaggcgtgagccaccgcgcctagccttgaacttgttggttctaaatgctacatgcacagtacctgggagttagaaaacaggaaatctagggcccaaaaggcacacagccaggggccttggccaggtaggtctggactgatttggggtggaggagtacctgacagccagcattctctcttcggggctctactgtgacaaggggagtctctctcctcctgactgttgatggggtgtggcacagacctaccataaaccaagatgtggggtcttcagctgttactgcccaccttataccttacccaccactgcctgcaccatcttaaagggatggtttagaagataactccaggggcacttgtggaagaaatgaagaaagaaatccaccttggggacttggatgggacaaacaagagtatcatggcctcagttcaaccacagagaacccaactgactagaatgctgtcccaccaagacgcccaattctcggtctataatgcttacccaatcctggctctttgctgggggctagatcgctgagtaatatgagtggaaaggatctcccagaattctaggatctttgggctggaaaggtccctgaaaaagtctgagcaaaagcttgttcctcactgtcattgcagcaggcaggacagcagacggtcacagcagcagcacaagggatggcgctggccagaagtttcaggagatttggtatctaggcctggatctgccaaaaaatcgctgggggaccttgagcctgtcactctgctcaaggttgaactacatgatctagatctcttctggctctaaaattctaaatatctaagtctcctgtggacacaggttaagttattaaccttctgccaaaggcacccctctcatcccaaccctggggccttcagaaaatgaggctgtgccagcccttccctcaccacccctgtcctgccaccataatcttcacagctcacaaggcacctcttccccactgccatccccataatcgccaggcctggctgtggactggttctctcctgagtctagagctgcctggctgcctgcagcctcctgtccaggatcagatctgcaatgcgactgctgctccatggccttcttgtagaccttgcactttccggcacctcctggcctcaggtccaaagtctccaacagctctgataccactaccttcctaccccctatcccgggctgcagtttccatctgcctcccattcctctcctaccctctccctccactccagtaaaggtaaccttataattttcctgacctccttttctgcgtttctctcctcatcatactctaagaagtttttcctaattttaagaaaaggaaggcatctatgtaagttagggtatggacccgaataatcttgctcttactatccccaaaaacaaaaagaaagtacaatctgtcaactcagctgctctatcactttaagagagtaagcatcccgaaggcaatgaccatcaacctcaaatatacatctatctgtccatcagagtgcataaacaatgctcatattcatgcaatggaatactactcagcaagaaaaaagaaacaactaaagatacacacaatggggatggacttcaaaatcatgatgtcaagtgagagggaaagaagtctttgacaaagagcacatatgggtatgattctctttatatgaagttctagtgcaggcaaaactaacctatggtgggggtaggagtgggatcgcatgagggaactttttggggtgatattcatgtcctgtatattgatagcggtttgggttgataagtatatgcacttgtcaagttatcaaatggtgcacataagatttgtgcgttcagccaggcgcgttggctcacgcctgtaataccagcactttgggaggccaaggcaggtggatcatgaggccaagagatcgagaccatcctgaaaccccgtctctaataaaaataaaaaaaattagccgggcgtggcagcacacacctgtagtcccagctactagggaggctgaggcaggagaatcgcttgaacctgggaggcggaggttgcagtgagccaagatgattgcgccactgcactctagcctgggagacagagcaagaccccatctcaaaaaaaaaaagatttgtgcattcattgtttgtaaatatccactcaaaagaaaagaactataaacaaatattgaactctagtgaatgatatgtatgttaaagtatttggggcgaaatatactgatgtctacgttttactttgagatgtgtaaaattttaagacagcttgatgaggttgggcaaggtggctcacatctataatcccaacactttgggaggccgagacgggcagatcgcttgagctcaggagtcggagacaagcctgggcaacatggcaaagccctgtctctactcaaaatacaaaaaattatctggatgtggtggtgcatgcctgtgggagctacttgggaggctaaagtgggaagatcacctgagcctgggaggtcgaggctacattgagccacgatcatgccattgcattccagcctgggtaacagagtaagaccctgtctcaaaagaaagaaagaaaaaaaaaaaaaaccatagcctgatggatggatcaagggatacagatgtgtaaaagcaaggataggaaaatgttaattgtagaatctaggaaatggagggtattcgttgcaaaattctttaacttttctgaatgtttgcaggtcattgtgataaaattttgggaaaaaatatgtatctatcagccacttcctaaaggcaagcaacataaagataagtaagcccagtgtcagagctcaggctttggatatcaagtaacaaacctgtgaacaaatctgagtaaacagggccgggcgcaatggctcacgcctgtaatcctagcactttggaaggccgaggagggcagatcacctgagatcaggtgttcgaaaccagcctggtcaacacggtgaaaccttgtctctactaaaaatagctgggcatggtggcatgcgcctgtaatcccagctactcaggaggctgaggcaggagaatcgctgaaacctgggaggcagaggttgcagtgagccgagatcatgccactgcactccagcctgggcgacagaacaagactctgtctaaaaaaaaaaaaattaaataaaaatgaaaaaaaatatgagtaaatagctatgaaatctcaggcaaatcacttaaggcctccatgcctccatttccccatctataaaaatggagataataatggtacctaccacctaaggtgggggaattaaatgaaatatatttaattaccctcagagaggtacctaatagtagcagggcacagtttttgcagtctaaatgacacagtagagaggataacagagtacacaagtatgactaaaataagtcaaaacctttgtacatggaaagtaaagcccaaagaagtgaaggtaacttgataagcacaaggccaagctggatcacactggcttgagtccagagggcccacgtagctagtgccaaggatactatggacaggcaatttgtaggggcagaaatacaaatggccatcaaacatgaacaggtattcagcctccataacattcacagacatgtgaaattgaggtatactattttcaattagcagtttagtaaaaactatcaaggttgataatatcaatcaattagggcatgggatgcagggagtctcataagtcttggtggaaacacaaattggtaggttggtgcaaaagtaattatggtttttgccgttactttttttttttttgagacggagtttcgctcttgttgcccaggctggagtgcaatggcccgatttcagctcactgcaatccgcctcccgggttcaagcaattctcctgcctcagcctcctgagtagctggaattacaggcatgcgccaccatgaccggctaattttgtatttttagtagagacggggtttctccatgttggtcaggctggtcttgaactcctgacctcaggtgatctgcctgcctcggccttccaaagtgctgggattacaggcttgagccactgcgcccggcccttttttttttttttgagacgcagtcttgctctttcaccaggccagagtgcagtggcacgatctctgctcactgcaagctccgcctcccgggttcacgccattctcctgcctcagcctcccgagtagctggtactacaggcgcccgccaccgcgcctggctaattttttgtatttttagtagagacggggtttcaccatgttacccaggatggtctcgatctcctgacctcgtgatccgcccgcctcggctcccaaagtgctgggattacaggcgtgagccaccgcacccggcctgccgttactttttaatggcaaaaacctcaattacttttgcaccaactaatgtattttcagaggtcaagtcagtggtatctgtgaaaaaaaaaaatttttttaagagacaaggtcttgctttgtcacccaggctggagtttggtggctcaatcatagatcactacagacttgaactcctgggctcaagtgatcctcctgtcttagcctcctgagtagctgtgactacaggtgtgcgccaccattactggctaactttttaaaaattgttttagagacaggttcttgctattctgtccaggctggtctcaaactcctggccccaagcaatcctcctgcctcagcctcctgagtagctaggattacaggcaccaccactgcacctggcatatgaaaatatttatgtacatattctttgggcaattccattataagacatctataggtacattcacataatatacatggctaatccttgcagcattgtttataatagcaagtctataaatataaaagtccttactagagaatagtaaaactggccaggtgcagcggctcaggcctctaattccagcactttgggaggccaaggcgggaggactgcttgagtccaggagtttgagaccagcctagacaacacagtgagactctgactctacaaaaaaattttttaaaagtagctaggcagtggtgcacacctgtgataccagctacttgggaggctgaggtgggaggatcacttgagcctagaagtcaaggctgcatgagccaagattcgtgctactgtgctccagcctgggtggagggagattatgtctcaaaaaataaaaaaaataaaaaaaaataaaatgctgggcatggtggctcacaactgtaatcccaacattttgggaggctgaggcaggcagatcacttgaggtcagaagttcgagactagcctggccaacatggtgaaaccccatctccactaaaaatacaaaactttgccggcgtagtggcgcacctgtaatcccagctactcaggaggctgaggcaggagaatcgcttgaatccaggaagcggaggttgcagtgagccgagatcacgccattgcagcactccagcctgcgcgaaagggcgagactctgtctcaaaaaaaaaagctaaattatacaactgagcagttgtataattaaaagtaaaaagaatgaagtagatttgtatacactgacctggaaagattctatactatattgttaagtgaaaaaataggttgcaggatagtttataattttgctaaaatttaaaaacctatatctatatatgtgcatgaatatattacatgtacgttgtgtacaatatttgcatatgtgtaggaaaaatatatgctctggggaggagactggaattttagaagggtcaaatagacttgtgtttcatccatattttaattttttttctttttttttaaataacagagatggggtctcaccatgttggtcaggctgatcttgaactcctggcttcaagtggtccacccaccttggcctccaaagtactggattataggcatgggccaccgcactcgggctatattttaattttttataagaacattcatctggtaaatgtgtatttgcttacacctaggagcttcagggagtggaattatctatcatttttcttctacttttatttcatcttttttttttttttttttgagacagggtcccactgtgtcctccaggctagagtgtggtgcgatctcggctcactgcagcctcaacctcctgggactcaagcgatccttcccaccgcagcctcctgagtagctgggactacaggcactcgccaccacacccagctaacttctgtattttttgtagagacagggtcttgccatgttgcccagcctggtctcaaattcctgggctcaagcaatctgcctatctcagcctcccaaagtcctgggattacaggtgtgaaccactgtgtccggcctactacagaaattttttaaatatttatataagatgatattttataaaacatatattaaactataaacatatatagtgcctaaaatatatataacaagcttttaaaaagcagtctggccaggcgcagtggctcacacctgtaatcccagcactttgggaggccgaggcaggtggatgacgaggtcaggagttcaagaccagcctggccaagatggtgaaaccctgtctctactaaaaatacaaaaaagtagccgggcgtggtggcgggcgcctgtaatcccagctgctcgggaggctgaggcagagaattgcttgaaccccggaggcggaggttgcagtgagccaagattgcgccactgcactccagcctgggtgacagagcgagactccttctcaaaaaaaacagcagtctggaaaaattcgatccaaaaatttatcagtggtcatctctggagagtaggggagaagaagggtaacactttagtaacgctttagctttctacctaatgattcaacttttttccagactaaaaaaaaatggacaaactagtaggcaatccaccagcagtaaagctgcaaacagggtaatggtcagtttaaggattgccttcatgtcttgaaaaagtttcagtggcttgggggacttggttaaaatagagttcactggtgtcttgtggctgtaagtggggacacatttaaatgggtcacctagcagctggcaaaagaaaaaaaaaacccaggaaatggaaactataacgttagagtcccaagacaagggtgcccagagttggctgtggtggatagatacttaggtcagtcctcccacccccacccccagaccacactcataaataaatacaaaggaaatactttcccgagagagccggcctctctcccttggcctctgacctccctgagcggccgtttcctccagccccgggaccccggctctctccccgcgctctgcccctcgccaagggttgtagcagcggccggaggggtagccagcacctggcctggccccgtgctccagggggagcctcctcccggccggctgtgctgagctccgcagcgccgggtgactccctgccaggtcacacggagcttatctggctccaggtgtgctccctcacgccgactgcacgcttctcacgtgacattagccagccctcacgccgccgcgcggggagccgggcggcccttggcgtttccccgcggctgggccggcgcagccgcagccccgcggcgcctcccgctgcgatcccatctcccccggaaggcagcaatcccgcgggccatggaggaacgcgagcgggagagctcctgcggcctcgccaggttccctgctgctcttccaggtgcaccgcctggcgctcagttccgctaacatccccttccgtgtgaccttgagcaagtcccctcccctctctaagcctccactatttcagctacagttatcttcaagggcctgacagctcagatttggccctcagcctctgctggagagctattctgctcaaccacacactgcaggttgtaatcccgctctgcctctgacttgctgtgtgaccttcagcccatcatccaacctctctgaatattagagaataatcacaataatctcttgtaagtgatgataaactacttggcagacagaaagggccctgggtcctgtaaaatcatcagtctaacaaccaaaactgctgcctgactctaaactgtttaaaatgtcaagggaaattgacattttacaagccctgcaattcctacctcaaaagaagggcagggaagtgaaggtgggaagtggaggctcaccaggtctgctcaccacccctcccaatccagctcctacctcggcacctccccaactcctctaattcaggccaccttggaaaatgctagggggaagaaatggtgatggggtggggtgtgcagatcttaaagcacccgggggtctgacccaaagcagaacttaaactccatcaagctgccctaccaatcccaagtcctgtgggaacctgtcaattacagcagacagtgggctgggccctcctactgccccaaacctttaaactacaaccagccagagcccctcagttttcccaccacactcaggcctgggaccccaggccaccaacaaaacccagctcacgtggatgctctggctcctgcctgtggcgtccaccccaggtgagaggatctggctgaggagagacctctggtttgaaggattaagaacagccctgctgccctgaagacctgtgacacagcaagtccagatgaaggcttcctgagttccaacaactcccagctccacctcagcagggtggattctccctttcacatgagccccagttctgccccacccagtccacctttaggtacctgcctctgggggacccagagttttcaggcccagtttctgaagacacatgcagtcctcaatgaatagccactaccagggccagtgagggggcctccagggaactggctggctacccagacagcccaggagtgaggctgagagaccaggtgggagtcaggaagggcataacccacatgaggaaagtctggggcgcaggaggaagccctcaggcacacactctggcacctgggccaggccaggagagagtaaacaaactagacactcagagctaccaggcaccaggtcatcaactgttcaaagttcaaagctcccaaaggaagtgaccgccagcctgtggcccctcccatgcccaccctccacccccacctacaacccttctcattcccctaatccctcaacacaatagctgcccccaaagccatggttttcctggaattgaggccacaacccccatgtcctcaacccaaaatggacaagcacacctccacccgaggctatatataacccgtcatgtcaaatccagaaaccaggaggatgtttcctggaaagacttcatcacaaaaaaacagagaggaagctgaggaggtgggaagccatggacaaagagccagtgaggcttgtcaggaagccagagacctcaggagagcaactttcaatatctccagatagaaagtagcccctgaactaaaaagggtggggaacattaggccaggcctgttgccacaacaacagggcaccaacctgctcaagaaaagggctccaaagcacaagggaaaggcggctgattcaatgggctctgtactcaccgtcctgctcaggtgatcttgctcttaatcacccaggtggcctcccctcccttccagcacaccccagtgcatacacacttcccagagctcacttgccacaggggcactgatgaggccttctcggccacagacacgccaggggctccaaaagacaagacgaacccacactaactagcccaagtcattggcagggtgaagcagggagggaatccaattctttaattcggggtggccatctgagggaatgaaagccctagccaggacagtccctctcaggaagcattcccccagccctccccacacaaatacaaactatgaggccagcgccaaacacatgccccattggcaaagtggtcaggcaaaatgaatacccgctcaaaaacaaactggctgtcttcctccccatctcccccaccccccacctctagctcattctggccgcaacctttccaactaatcagcaagacacatgtgccttgcagtagggcaactcccccatctccacccccaaaacaaagccccaatgcctggcctgtccctgcgggccttatcgcacccaggaacatgacccacactcctggccgggtttgggaccaaggagcgcacccccactaacaaggggcagggtgagggggcagccacccctaccacctccccttcccattggcgaaacaactggcatgacaggttagcagggcggggcgtcggggcggtctctccagaggcctggggcagcttgtccgaccttcccacacgcaccccacccctctgcagggaaaggtgaggtgagcattcagtctcagggcacagcctgcactccctaatccccaaagcctgccaccattcaccctctcatcttctgtcccaagaggagggggcccagggaagcggggtctccattgttttgccagctgtctagcagctgctcctttgagaggagcccgcagtctgcccggcagtgaaagagtgaaggccgctgggagggataaaagggtcggtagaggtgctccccttccccgctgccttcctcagcgccccgctctctcgctcgctccatcgtggggcctggacgggggcaggagaagtccccccaccctcgaggctgcagcccccaccccgcagctccgggccacctgggcgcctccaagccccaaatccccccacactgaaggccaccctgtcctgcctccctgcgccccccaggttggctggaagggccggtggttcccccttccccgccgctcccgatcggcccccacccccgggcgtcgagctccacggcgccgccagggacgggagccgggagtccgggccgctgcttccaggggacgggggaggaggaggaggagccggcgggccccgccgcccgcccgccctccctcccggccggagcccgccccgccgccccaccaagccgggcccgccaccgagcggccgccgccgccgaccggcactcaccggccaccggagcccgcccggcaggcagcagaagcggagacgcggcatccagcagcctcggcccggtcagggatggagcagagcgcagcgcggcgcagctcagcgccgcccccagcgaccgcgcaggccgagccgaaagggagctccctgctggcggctgtggggataaacgcccggcctgcctggcagcgccagtgcgcgccgccagacgtgggccaggcgggccgggcgctgccctggcagcctccgtccgctgtggactccgaagcccctctcgctgtgtctgagagaggccctgcctggagtttctgtctgcactgggcactggaggctgtccgaaaagggtccgaaaggggctgagtggcactgcctaggacaggcaccagggtcatgatgaacgtatagaagaggggctgtccaaggcaggcaccgaactctgcaggctgtgttcaaggtagtgctgtctaaaggaagcaattaagtcttactggccgcctcctcccaaggtggctctgcagaggcacacacagggccctgctggatggtgccccaggctcagtccagaccaggtactgcctgccatgtccgagatggcactgccagaatgcactccccaaggtaaaaacagactcccaatagcttggtctgatacagccctgcctcaaaatggagtggatcaagaggcgtaccagggcccgggagccatggctgtaagtgccactcactccctaaaggagttcaccaatgccaagattaacactttcagaagctctttggaatgcagtctgtccctgggtccactgtgtgctgtaaatatcaagtgagctgctgtacccaccaagaagacagtttatacttcctgggagaggccaagggacatccagataccaggcctccaagataggtgctatgtctagagtttggagaaagaaagaaatggggacacttccctgggcagtgtccatgctggagtggggtgtgccagaatgtggaagaaactgagtggggtggtgcaggaagaagggtgtagcagacaaatgctgctacctccctagacagcccaaacaggaacttctccaggcaagggcagcccaacctgacagaccagggaaggctggagcaaggaggctcagaaagcagagagttgagtaagagttagggagttcctgaggaatagacccaggcgggatacacattttggaataacatgcaactcaaattcaatttaacaaactgcctgctaagtgccaagtgcagccccaggcacttggggtgacacagaaggagatcagacatggcatatctccagggaaatcacatggggaacaggtagacctgagctgtgacagtagtagggttcaccatgctggcattacttggatgatgagataggtgctatgatgggaggcttatttggcttgaggagtgagaagagcagcttcaaaaacatgacatttgaggccaggcatggtggcttatgcctgtaatcccagcactttgggaggctgaggtgggcagatcacttgaggccagcgttcaagaccagcctggccaacatggcgaaaccccatcactactacaaatacaaaaaattaaccaggcgtggtagtgcatgtctataatcccagctacttgggaggctgaggcaggagaatctcttgaacctggggagcagaggttgcagtgagcggagattacaccactgtacttcagcctgggcgacagagcaagactctgtctccaaaaaagaaaaaaaaaaaaccccaaaaacatgacatttgagcggaaccttgcaggctaagtaggacaacgactatcattagtgtttcctgagtacctattatatactagacactatctctactcctcacaatgaacctatgagggagacattattattatagataggggttgagtgcatggactctggagctggattgcctggattcaaaatctcagttctgtaaagtactagctgtgttactctgggtgattttttataaatcacctctctgtgcttcactttgctcatccaaaaaattgggataataacagtgactccctccctcaaaatttgttttgaaaattatataagcttagtcttttcaacacatggggcttttcaacaaactggacatccacatgcaaaaaaaaaaaaaggggggggtctagacacagactttatacccttcacaaaaattaactcagaatagattatatacctaaatgtaaaacacaaaactataaaactgtctcctagaggataacataggagaaaacctagatgaccttgagtatcacaatgactctttagatacaacaccaaaggcaccataaaagaaagagctgataagctgggcttcattaaaattaaaaatgtctgctctgcaaaagactgtcaagagaatgagaagacaagccacaactgggataaaatatatgcaaaagacatctgataaaggattgttatccaaaatacgcagagttttaaaaactcaacaataagaaaatgaaccacccaatttagaaatgggcaaaaaacctgatcagacaccttaccaaagaagatatacagatagcagtaagcaaaagaaaagatattcaacactgtatatcattagagaatagcaaattaaagccaggtgcggtggctcacgcctgtaatcccagcactttgggaggctgaggcaggtgtgtcatgagatcaggagctcgagaccatcctggctaacatggtgaaaccccgtctctactaaaaatatgcaaaagacatctgataaaggactgttatccaaaatatgcaaagagttttaaaaactcaacaataagaaaaccacccaatttagaaatgggtaaaaaacctgatcagacaccttaccaaagaagatatacagatagtagtaagcaaaagaaaagatactcaacattgtatgtcactagagaatagcaaattaaagccaggtgcagtggctcacgcctgtaatcccagcactttgggaggccgaggcaggtggatcaggaggtcaagagatccagaccatcctggcctacatggtgaaaccctgtctctactaaaagaacaaaaattagcctggtgtggtggcatgcacctgtagtcccagctactcaggaggctgaggcaggagattcacttgaacccaggaggcagagggtgcagtgagccgagattgcaccactgcactccagcctgggtgacagagcaagactccgtctcaaaaaataataataaataaaaaataaaagagaatagcaaattaagatgaccatgaggtaaaactactttatttacctaaatttggattttggccaaaatccgaaatgccaacaactccaaatgctagcaagaatgtagagcaacaggaactcccattctctgctggtagcaaaatggtatagccactttgaaagacagtttggtggtttcttagaaaatgaaacatattcttaccatacaatccaacaatcccactccttggtatttatccaaatgaattgaaaacttatgtccacacaaaatcctgcacatgatgtttgtagcaactttattcataattgccaaaacttggaagcaaccaagatgaacttcagtaggtaaatggacaaataacctatggtatatctagacaatggcatattatgtggcactaaaaaagaaatgagctatcaagccatgaaaagacatggaggaaacttaaatgtatattaataagtgaaagaagctgatctgaaaaggctacatgttgtatgattccaactatatggcattctgcaaaaggcaaaactatggagacaataaaaaggttagtggtgccatggattaaggttgagggagggatgaaaatgcaaagcacagaggatttttagggcagtgaaactcttctgtgtgataccgcactgttgaatacatgtcattatgtgtttgtcaaaacccacaaaatgtacaacaccaagagtgaatcctaatgtaaaccatggactttgggggatactgatgtgtcaatgtaggttcatcgattgtaacaaatgtacaactctggtgaagagtgtgatcgtggggaaggctgtgcatgtgtcggggcagggggcatatgggaaatctctgtactttatgctcaatttggctgtgaacttaaactgatttttaaaataatatttattattattattttgagacaggatctcagtctgccacccaggctggagtgcagtgctgtgatctcagctcactggaacctctgcctcccaggttcaagtgattctcctgcctcagcctcccaagtagctgggattgcaggcatgtgccgccacaccaggctaatttttgtatttttagtagagatggggtttcatcatgttggccaggctggtctcaaactcctggcctcaggtaatccacccaccttggcctcccaaagtgctggaattacaggcgtgagccattttgcccggccttgtatttattaatttttaaaaattacatgatttaatatataaaaagaacaatgcccagtacatggtaagcattctatagctgttagcttggttatctttcctaactcatagttgtggaaatgaagcacagacagctttgtgacttgtacccagcctaagagtagcagagtcaggattcaaactgaggtccctaaggctccaaagcccattcttttccctacaccatggcagtgaaatgaataggtatattaacaactcttttttttttttttttttaggaagagtttcactcttgttgcccaagctggagtgcaatggtgccatcttagctcactgcaacctccgcctcccaggttcaagcgattctcctgcctcagcctcccaagtagctgggattacaggcgcccgccaccacacctggctaactttttgtatttttagtagaaacagggtttcaccatgttagccaggctggtctcaaactcctgaccttaggtaatccgcctgccttggcctcccaaagtgctgggattacaggcgtgagccaccacatgccagtcaacaactcttttatttacatgtgtctacacctagggcactctctgggtagcatatggtgtccctgagagctcttcttgcctgaaccaggaaccagtttcagacactaagcaagactgaaactccagggcagcactcacactgacacagtaactctggttcttcgtcacttgattttagtcttttccttcccaaatgccagaataaaccctgccctagctctaagtaaaagtaaaagtaaagcacccctctcctcttcgcacagaaaaaagccagagcagtatccacataaaatcacccagatggtcatgggaaggccaatttttccagaagattcctaaagtcctaaaatgatccgactttaatcaagaagccctccaccccagaaagaagctgggtaataaaaatcacttatatcaagggagcctaactatgggtcaggcactatgctaaccccttaatccaatgtctcacttaatccccagaattaccatattagggagatgctagtcttatccccatttcacagattagaaaccaggcttgggaaagtgaattaatttgcccaaggcactgtgactaataaacagcagagcctggaatgcttgccctgaagctctgggctgcatcctgggtggagtggtgagtgcctgggctttggggcctcacagagaggatgcttggctctagcagctgccagcaagctccttagcctctctaaacctcaatttcctcatctacagaagaggtataataatgtggccaggcgcagtggctcacgcctgtaatcccagcactttgggaggccgaggcaggcagatcacgaggtcaggagatagagaccgtcctggctaacatggtgaaaccccgtctctactaaaaaacaaacaaacaaacaaaaaaattagccgggcgtggtggcgggcgcctgtagtcccagctacttgggaggctgaggcaggagaatggtgtgaacctgggaggcagaggttgcagtgagctgagatcccaccactgcactccagcctgggggacagagcaagactccgtctcaaaaataataataataataatattaatattgcctaccttgtaagggtgtgagataataaaataagcaaattcatttaaagcaattagcccagtgctcgaaacacagtaagtggttaacaagtgttaggaattattaatctctctgaacctctatttcttcatctgtaaaatggaggctgataataatatgtagagttactgtgaggcttagaagatatagcaaatggtaaagtgtgtaagatgatgcctatcatgtggtaagttaccacgatatgactctccaaaaagaattgaaaataagcaagtctgcttttttaaaagtccacagaattgcaaatctgcctgatagctggtgttgttcaaacgtcaaaagcacacctttaaatattgttcctcaaacatttattagcttattgcatttattagcttaagatcctttaccctttgtgcagaaacttggagtgtgggtggagaatgctctccaggaaacttaaagctaaattcttagagtattggctgaagatcagtccaaaatgaagaaactcgtctctgaaatgaggtaaaaaagctactaacaggaagtcaaacacatatacatgtaaacaaaataatataataaacccccaagtagccagcatacaacttcaatagttatcaactcacagaaatattgtttcaactatctttccacctactccccaacccccacactgagtataattttgaagcaaatcccagatatcaaataattttatataaaaatatttcaggccgggccgggcgcggtggctcatacctgtaattccagcactttgggaggccaaggtgggaggatcatgaggtcaggagattgaggccatcctggctaacacagtgaaaccccgtctctactaaaaatacataaaattagccgggcatggtggcaggagcctgtagtcccatctactcaggaggctgaggcaggagaatggcgtgaacctgggaggcagagcttgcagtgagccaagatcatgccactgtactccagcctgggtgacagagtgagactcaaaaaaagtaaaaatcaaaaaaaaaattaggataaaaaaaaatttcaggcaggtcgttgtggctcatgcctgtaatcccagcactttgggaggctaaggcaggcagatcacttgaggtcaggagttcgagaccagcctggctgacatggtgaaaccctgcttctactaaaaatacaaaaaaatacaaaacaaaaaaaattagcctggcatgatgtgtgtctgtagtcccagctacttgggagactgagacaggaggatcagttgagccagggaagcggaggttgcagtgagccaagatcacaccattgcatccagcttgagcaacagagcgagaccctgtctcaaaataatcaaaaaggctgggcacggtggctcatgcctgtaatcccagcactttgggaggctgaggcgggtggatcacttgaggtcaggagcttgagaccagctggccgacaaggtgaaaccctgtctgttaaaaaaatatatatacaaaaattagccagacgtggtggcacacacctgtaatctcagctatttgggagactgaggcaggagaatcctgtgaagccaggaggtggaggttgcagtgagctgagattgtaccactgaacttcagcctacgcaacagagagactctgtcaaaataagaaagaagaaagaaagaaagaaaaaaaagaaagaaagaaagaaagggaatttcattgtgtatgtctaaaaggtaagggtttgacaaggtctggctctatcacccaggctggaatgcagtggcacgatcttggctcactgcagcctctgcctctggggcttaagtgattctcctgcctctgcttcccaagtagttgggactacaggtatgcaccaccatgcccaggtaaatttttgtttgtttgttttgtagaaacggagtttcaccatgttgcccaggctggtctccaactcgtgagctcaagcgaaccgtccacctcaacctcccaaagtgctggggtcacagacgtgagccactgcgccagccaggattattttttaaacaaaaccataatacaatggtcataccaatttttaaacaataatttttttttttttgagacagagtttcactcttgttgcccaggctggagtgcaatggtgcgatctcggctcactgcaacctccgcctcctgggttcaagtgattctcctgcctcagcctcccgagtagctggaattacaggcatgcgccaccacgcccagttaattttgtatttttagtagagatggggtttctccatgttggtcaggctggtctcgaactctcaacctcaggtgatccacccgcctcagcctcccaaagtgctgggattacaggcgtgagccaccatgcccggccttaaacaataattttttaatatcgtcaaacattctattatctccatgatggaatgatctccataaattccaattgtctccgtaaatgtctttttttaaaaaatgtctgtttgaatcaaggtccacacattgcagtgagttgacatgacttttaagtatattttaatctacaggtttcccttctatctctttctgttttccccctgcaacttatttgttgaagaaacatggtcatttatcctatagattttctcacagtcaggattttgtttattgcatccacataatgtagtttgatatcctatcattggtagatagatctaaggcttgatcagctttgagtttgatttttttttggcaagaatatttcttatatctggaagcacatagtatccagttgtctctgaaacgatactttaagatatcagaaattaatgattgtcttcacttgaaatataagaatataaaaagagtctatccagcaacagataaatggataaacaaaatgtggcatatacatacaacgtatgcacatttttattcagccataaaaaggaatgaaattttaatacaggctacaacatggatgacccttaaaaatgttatgctaagtgaaagaatccagacccagaaggacaaatattgtttgattctccttatatgagctaactagaatatgcaaattcatagagacagaaaatagaagttaccatggactaagggtggggggaattgtgagtcattgtttaatgggtatggagtttctaccggggattatttaaagttctggaaatggatagtggtgatggttgtacaatattgtgaatgtacttaatgccactgaattgtacacataaaataatttaaatgtacacataaaatagctaaaatgcagagattaactattttatacataaaataattaaagcccaggagttcgaggctgcagtgggctatgagcacatgactgcacaccaccctgggtgacagagccagaccctgtctttaaaaaaaaaaaaaaaaaaaggtaaattttaggttatgcatattttaccacagaaaaatttgtttaagagcctggctattgcatagaatatggcccctcttacaaacccctgatggcataagtttatgtagtggcctttctatgaacctacagccttactcttgcactgatctacacatagctgtggggctccttctacacttccaagaatttcctgacctctgcctgattctacagtgagcaggggatccatagccctgccagccaggagcccagctccccagactatggacatctacaaccaggaggcagccaggcaaatgcttctggagttaaaaggctgagattgagccctgcctttgccacttacttggcacaggtgcttcatcaaacgccaacctctccatctccactcctgtgcaattgcagctacaaactcttacctcgcagggttattgtaaggatcaaatgaggtcatacaatggtcaagtgctgtacaaagagagctttatgttattatggttggagtgattcagaaaggatcaacctagtcacttgtgcccaggagtttaagaccagcctgggcaacacagtgagataccatctccacaaaaaatcaaaatgaaccaggtgtgcctgtagtcccaggtactcgggaggctgaggtggaaggattgcttgagtgtgggaggtcaaacctgcagtgaggtgtgatcgcgccactgcactccagcctgggcgacagagcaagactctgtctcaaaaaaaaaaaaggttcaacttaggacttaggtcatcaactttaaggaaaattgataccttcagaagctagctctttgcaagctaaacttttcttgacatcactcatggtaaggtcagcagtagggtgaccaactctgctggtttgcccgagactgagggcattcccaggatgggagttttcagtgctaaaactgagaaagttctgggtgtgagttggtcacccaagcagtaaccgcccaattgctaattctagagcctgcctccctggcctgctagtcaatgcctattcgacctgccttccttctagaacttggcctccagaagtacttgtggatctcctggctagatatacttcctctgtttgactttcattgctgacacttctcaggatttcttcctttgccttttgctcttatgatcctacactccctccttgggagatcttgttcattctcaggactcctaaacacctcccacacagtggataactcccaaatctccacgcagacattactctagaggccagcctggtatgtccaccatcacttacaaataccctcagctgtatccaaagtgaaatgtacaaccttcaccacagactttttccttttggttaataaccctaaccctcttttgctggggccagaagtccactttcccttcctccttcctctccttcagccaccatcctcaggcaccaagtcctactgatctaatccctaaatatctctcaaatctaggttgggtgcagtggctcacgcctgtaatcccaacacttagggaggccgaggcaggcagatcacttgaggtcaggaatttgagaccagcctgaccaacatggtgaaaccctgtctcgactaaaaattagctaagtgtggtggcgcatacctgtaatcttagctactccggaggctgaggcacaagaatcgcttgaaccctggaggtggagattgcaatgagccaagatcatgccactgcactccagcctgggtgacagagcgagactccacctcaaacaacaacaacaaaaatctctcagatctccatcagccactcattcccactgccatcgcctcaattcaggccttgtcaactcttagctggacaatagcaacggccttctcgtggtcgcctgcttccgcttcatcccctctaactggtcctccatgtggctgccagagttgtctttccataatacaaatatgatcatgtcacttcttggcttgggattcctcaaaggttcccaatggcccagctcaggggtcagcacactttctgtaaaggacttgatggtaaatagtttacgctttggggacaagatggtctctgtctcaactactcaactcttattgtggcacaaaagcaatacataaatgaatgggcatggctgtggtccagtcaaactttatttactcagccaggtgtggtggtgtgtgcctgtgctcccagctattcgggaggctgaggtggaaggattacctgagcccgggagtcggaggttgcagtgagtcaagatcatgccactgccctccagcctgggccacagagtaagaggctgtctcaaaagtaaacaaaaacaaaaacaaaaaaactttatttacaaaaacatgtagcataacagccacctctctctttgtttgacccaagggcagtagtttgctgacctggcctagggaatagaatccaagcttctttttctttcttttttttgagatagggtctggctctgtcacccaggctggagtgcaatggtgcaatcttggttcactgcgacctccgcctcttgggttcaagtcgtcctcccacctcagcctcccaagtagctgggaccacaggtgtatgccaccactcccagctaatttttgtattttttgtagagacggggttgtaccatgctgcccaggctggtctcaaactcctgggctcaagtgatctgcctgcctaggcctcccaaagtgctgggattacaggtgtgagccaccatgcccagcagaatccaaacttcttagcataacccaaaagactctttacatgcagcagccatgggaaatgccttgctctccccagaacgtagcaccatgcctttgtatgtgctgccccctccatttgaaacatccttccccatctcccaagttgagggagtccactagttcttcaaggtctattctaaatgttagcttctctgtggagctgccccacaaccccttcaggaggagttggtcgtccctcaccgactccagcactttctgtctcttttaccacatttatcattctatgaatgtatatggtatttatttgtcatcatgtcttttgactgtgatgcttcaaaaccagtcttatttatacttcttcctccccctagtcccaagcacattgctgggattatgatagggtaataatagctactgctaaacaccatatgtgtgttctcatttaatactctcagcaaagcccatggaggtaggcactgttatccccattatacagatgaggaaatgaggcgtggacagtagaagtaacttgcccaggtcacacagctagtaattgcatagccaagactagcactcagatctctgaccctgaagcctaaagtttgattaccatattatactgaccagtagttatttgcttaattaatagatgtattaagacaataaatgtattaattatttccatggcacaagatgtcaaaattacatggaaagtggctttcccttcggtcaagagccctgattatagtcacggagaagagctggctaaattccctgagaacagatggggcccaggagaaggtcactgactagctgattatgagcatgggaaaaaggacctgagctatatttccaccatgtaccaaaccagagcaaggtggaccactcccattttaatccttccaacaactctgcaaactccatgttgttattttcctatttaaatgaggaactgaggctttaaaaggtcagagattggccaagaccacacagctattatagataatgtcagaagcaggattaaaactcaagtctcaatggctctaaaaccacaagtaatttccacaaatccagtttgttccaaagaaagagtaaccagcagggtctcctgatttcccacatagcatccagcaaatcctgtcacctgtctccagctcagagttcccacttatagaggggggctataatcctcccagcagagacagaatgaacaaaaccaggttatgtctccattattctttccttggaaaatggctctacatagaaatctatctgggctgggtgcggtagctcacacctataatcccagcactttaggaggccaaggcaggaggatcacttgatctcaggagttcaagatgagcctgggcacatggggagaccccatctctacaaaaaattaaaaaattaaacaatagctgggtgcagtagctcacgtctgtaatcccagcactttgggaggccgagacgggcagatcacttgaggtcaggagttcaagaccagcctggccaacatggagaaaccctgtctctactagaaatacaaaattagctggcttggtggcgcatgcctgtaattccagctacttgggaggctgaggcaggagaatcgattgaacccaggaggcggaggttgcggtgagctgagatcgcaccattgcactccagcctaggcaacaagagcgaaactccatcccaagaaaaggaacaaaggaaggaagaaaggaaggaaggaaggaagggagggagggaaagagggagggaggtaaagaaagaaagaaagaattactcaaactcagtttgaacactcagtaccaccctgcattatcctcccccttcccaggggcaaccactattctgaattggatgtttgttatttccatgcacttccatacgcttttattacatagcatatatcctcaaacaatataaaatattattttacctagtttgtaaaaataataccacactgtcattactcttctgaaacttgctctttttgctcatcattgaaagattcctattatttttaaaaaaagaataacaaaataaagaagaaagattcctattaatatgattagctctaatttattcatttcactgttgtataatattccatgatgtgaatataacacagtctgtctattctgttgataaatattcatggttgtttctggtttttgctatttgcaaaataatgctgctatgaacattgtgagacatatcttcaggtgctcactgtgcaagatattttctggtgcatatatttaggaatagaattgctgggtcacaggaggttgacatctccaattatcctagatattgtccccctcacttttttttttttttttgagatggagtcttgctgtgtctcccaagctggagttcagaggtgtgatctcggctcactgcaacctccgcctcctggattcaagtgattctcctgcctcagcctcctgagtagcagagactacaggcgtgcaccaccatgcctggctaatttttttatttttagtagagacggggtttcaccatgttagccagcttggtctcgaactcccaacttcaggcaactgcccgccttggcctcccaaaatgctgggattacaggcgtgagccactgcgcctgccgcccccgccacacacactttttaggacctagacatcaataatctgaggctgaaaagcagcttcaattgcagcaagcaggactgaaattagaccctgcaaggaacttttttagttgttaaaggattgttagaaatcggcccaagttgtggaagacactggaggaatgtctgtcactctgcttttctgacatgcctcaagtacagctcagtctggactcagttctaattgtagcctaaagatttcaaaattaattaaatcggcatatatgagttgagctcctattccacgcaaagtgctaagctgggagcagaagcttgtgtcctcttcctgcaaagcacatcgtcaccacccctccttgcaactgagatgaaagaccaatgagagacatgtgcaaagttacacagcaggatgggatttaaataactgctgaagaccacagtaaaggggaagtcacaaaatactgcgtgactaattgttaagtgaaattgccttggaggcacagaggaaaaaaatcagagcagtggtcaaggaacgttgcacagaaaaaaggtagtatctgagcaataatagtagaatgtaggtgataatcatggcatctactactcattgatgaacattgtgtgccttgcactttactcagagtatcttgtttaatcctcacaatgaccctgtgaagaaagtatgattagtctcttctgacacagcaggaaactgatcaccagaagaccaagtagcttacgcaagctcacacaaccaccgagtggcggggcaggattcgaacttagtcctgaagcctcccacgtcagaggtccccgggagggaacacaagcaaagggtgggaggtaggggagggagccccaggcacagctcctggtgtggctagaatggagggcttctttggaaaaagtaggtgatccggctagaaaaggaggtccaggctggctcatggaagatgctggtttccaggcataggaactttaagtgattaattcaaggagattccacagcgaggcaggtgtatgttggaatagaggaaagggcagtgcaggcagagaggtgcctggcaggttcagcaacagcagtgcagggggccgaaaatacaaacttgaacaaggaagatgacttggggacccaacagaggggacaggtgtaggagagacttacaaggaagaatgtgtggggacttggcttccaacagccgtaagagcaactgagggaggaattgacaatagattccacaattgtgggtggcccaggaagctaggcaagcaaaagcaacgctgtaggcagctgaggttaatacaaatggctaacgtttgttaccagctactatctataagcactttacatgtataaactcatttcaccctcacagcattcctatgaagtaggagtgaggatctattatgatttccgtttttcagttagagaaactggggtacagagaagttaagcaatttgtctgaggttacaccactggtaaatggcagagctgggatttgaacctgggttccagaggcctcactcttcatcacttcactaaactgtgtctgttgaggtaacatcttcagaaagaagcagggttttccactcccactccacattccccaccctcaaagaccaagcaggatggcaggatttttttgctgagtggcattgctgggggggagtgtcaggtctctgctgctaccctaagccagctgcttgtcaccaccgggcagtgagcatggggcgtgcggtgctggggcctgcactgctggggcactcaccagcaggagggcacctggagcacggtccttcctcatcacagtggagcagaagtagcactagctggtgcaggccacagagcgtgcctggcaagggaagacccagcccaggtagcacaactccatcgggttcaggaggaagcagcccaaccccacctgcacatgaagttcaggaagattttcttcctcatggctctggacacaaagcagtcaggactggagggacaggggaggagtggcagtgaagcaaccatggcatatcacacccagagagtagaccccaccaggaaggccagctccatgcaggcccgcagcaccacgtgggcagtgcagacagccaggaccctgtatgactgcaggctggggtaccaggtggcagccccaaggcatttggggaaaaacctcctctcctactaagagctgcccctctagaaagaaagaagccccaaggggccccagcctgggtccagggagagcccctccagctgccagctcttgcacggtttccagcaggtaccccctctccacatccactgtctcccattcaccatctagtgcagcacacagacaacaaagaagatggagggtacggccaccagcacaatctggaaagccccagcggaagtgggagaagtggtcattggtgcagccaggccgcagggtattgcagatgaacttgcagtgctcatcccacagacagcacttcccagcagggcgacaagcaggatgtgtaagaccaggacagtgagccataccttgccaaccacggtggaatcgttctgcactcgggtcaggagccagcccaggaatgaccagtcgctcatcttgtgatttctgtggacacagaaatcacaagaaattgaagtgaggggacaggaagggaaggggacgaaaacataatgcccccacagccagatatttgcaaagctatttctggcccacagcaagagctccagctccatctgtgcctgacgcccaggcatgccactcgctgcctgacaaggatgggaagaacaagctggcagagaaaaggacactgcagaagaaaagatggaagcagtgactcccagaaggagcccaacgcagcccaacattcaccaagacaggctgcacacttctattacagttaggcttccactgaactcttcctaactcaacaggctttcgggcctcccaactgtcttggcattttcttcagatcgacatagtaccaggcatatttctcccaagatgccacggtggaaattcatgacctagattgtgtttcttccgagtccagggtaacatgttttttgactactatgtcagggtttgaaagagacaggccttacatcctcctgtctctgtccagtggattctccttaaggcctcatattgcaacaatctcattttactttacatttctgcagcttctgaccctgagaattactgaaaaaattcccaagggtatagcttgtggggcatttacacccattatttctgtcaacactctcccttctgcctctcaaataaacatgtagtttatttatttattgtatttttttagagacagggtcttactctgtcacccaggctggagtgcagtaacatgaacatagttcactgtaacctcaaactcctaggcggaagtgatcctcctgcctcagcctcctgagtagctaggactacaggtgtgtcccacatgcccagctaattaaaaaaaaaatttgccgggcaccatggctcatgcctgtaaccccagcactttgggaggctgaggcatgcagataacttgaggccagaaattcgagactgcctggccaacatggcaaaaccccaactcctgactctactaaaaatacaaaaattagccaggcgtggtggcgcatgccttgtagtcccagctactcgggaggctgaggcaggaaaatcgcttgaatccagtaagcggaggctgcagtgagccgagctcatcatgccactgtactccagcctgggcgacagggtgagacgccatctcagaaaatatgtgtgtgtgtgtgtgtgtgtgtgtgtgtattatatatattgtatattatatatattatatatattatatattttttatatattatatattatataatatattttatatatattatatattatataatatatattatatatattttatatataatatatattatataatatatattatatataatatatattatataatatataatatatatattttgtagaggcttgagggagtcttcttatctcacccaggctggtctcgaactcctggcctcaagcgatcctcccacctcagcctcccaaagtgctgggattacggtcgtgagccactgcacccagctgacacagtacgtagcctgcttactacgcagcagtacgtagcatgcttactatacaaactcagggtaaagaccagaccccagccttccctgtaactgattgccttctctaactccctcctaaacagaatcctggagatcctactgagaaccttccttcttcctccttaactttcaggaagccaagttgtcttgactcttatctccctggctgctccgtttgagtcaatgtgctgttcttctctccactctgtagacattaatgttcctcaggatactttaagcctcttactggtcctggaggacgcagtccactaggatggccacaggcatttccaactcacattaaacatactctcctgggccgggtgtggtggctcacgcctgtaattacagcactttgggaggctgaggcaggcggatcgtctgaggtcaggagtttttgagatcagcctggccaacatggtgaaaccccagctctactaaaaatacaaaaactagctgggtgtggtggcaggtgcctgtaatcgcagctactcaggaggctggggcaggagaatcacttgaacctgggagacagaggttgcagtgagccgagattatgccacttcactccagcctgggtgacagagtgagactctttctcaaaacaaacaaacaaacaaaacttactctcctggaaaggagtgttatagtggctatgaactcagacttagacacccagagctgtgtaacctcgagcaagttgcttaaactctctatgcttctgtttcttcatctgtgtaatggagattctaaggggatttacctcatagagttgtatgggttacttgagttaatgtatgtaaaggacttagaaaagtgcttggcacatggtaagtacttcattaatattaagtattattatctctcctccaaagctactcctcttcctgtcttggtgaatggcaccatcatccaagttgcccaaatcctgatcattatccatcatttctccctctcgcttctcctcatctaattggtaaccaagtccccacagtactacttccttaatatctctcacacccactgccttctcatcagtccatggcatagacttagtccagaccttcccctttctcttgccggcattattacactaacctcctagtaacttgctctgcctccagttttgtccctttgatctaccctcaaatggctgcattcctatagattttttttttttttgagacggagtcttgctctgtcgcccaggctggagagcagtggtgtgatctcagctcaccgtaacctcacctcctgggttcaagcaattctcctgcctcaacctcctgagtagctgggactacaggcacgtgccaccacacctggctaaatggctgcattcctaaaatgcatatctggttatgcatatggtttcatctccctcatcaaaactcagccgcgtgcaaaggctcacgcctgtaattccaaccctttggaaggccaaggtggatgtatcacttgatctcagaagttgagaccagtctgggcaacacagtgaaaccccgtctctacaaaaaatacaaaaaatagctgggtgtggtggtgcatgcctgtaatcccagctacttgggaggctgaggtgggaggatcacttgagcctgggaggtggaggttgcagtgagccaagatcatgccactgcactccagccttggtgacagaatgagagcctgtctcagaaaaaataaataaataaataaataaataaataaataaacaactcactctccaatggcttccattgtccttgggataaagcctaactccccaagaaggcatgtaagaccctctctaatctagtctctgcctacacctccagccccatctgtgtcctccttacccttcagctctcagacttcctggaagccctacacacctgcagacagcttcatgctcctgagcagtcactcaccctcttcctctgcctgtccagccccactgtcttccagccaattcttacttacctcccaacattcagttcaagcagtaccttctccaaggaagtttcctgatcctatcccagaaaggactgaccatgcccatggtggtctcctgcttagtgcattgtctgctgaacataatgtctgtaatttccatttataaacaaatttcatttaaaacataagaattatctccattacttgactgcgaatcattcaatggcagaaactgtatcttatttgtcactactctttttttttttttgtaaagagaaaaaattttattgtgatataaaatgcacttataaaatgtccaccagaaggcatgtaattcttcactgctatataaatttactgggaatatgttattcaccatctaggtatgatactgccaactaaaacatactgtaaacgatgagttatactctataacaaatgcatcactgattttcagcaatcattggtttaataattagtttaagactataatcacatctatattctggaatgtccatttactttaatgtagtgtagtggaatttagagtataattgcacatagatggtacagaaaaacattcacttctaaattattgtataccttcatgacaggtagtcttcctgactgaaaataacagcttcagctatggtctgctccaggattcttaatgcaataatttgggtgtatgtgtgtctgtctacgtgtacacccatggaacaacttatatctttagtaaacaagtgcaacattattctcagttattttgcatgtttaaatattatagtctgattatttgtaaacaaacaaaaccccacacaaatactctaaattctattttaaaaatctgtcaacccataattattctaatatgctttacttactcgaacacaaatttctgaaaggtgcatatattaccttagataataaggtttagaaatgagtgcttcacactatgaaatgtgcatttccgataagtgatttatgcagcataaagtttagatcaagaaattacaaatcctggatccccacagttcatttagaaaatgcctcaaagttatggctcttgcagcaggtttaacagattaaacattaagtgttctagctccctctatttcaagtatcaaagaaatatgaggctcaaaatctctctaggttgtaactgataatgcaaagcattagaaaacagttaaatgtgttttgaaatacagtattaactgagattattaaggtgtttatctacgttagcctgttaagtaccaggactttaaagtaattttaaatctgagtatttgctcagaagtgataaagaacacaatttgcctataaatgtatggttttggagaaaaaagtcaatcctgatttttaaaactcaacattttttgtttccttttgaatgatattaatttaaatttcaatctgaacataaatgtttggcctcacagagcattagaaagataatttactaaggctgtttaaaagtctttcaatgtcattagaaatcctgcagtatagaaaatatctggtacccttaaagtttcagagtgagctgatctgcaattttaatgctattaaaaaaaaagtcaaatataaaagactgctgcaatataaagcactatttctaaaagttgcagacatgatcctacagtctgacagagctagcacagctactcggagtaagcaacttgcggccttttccgaggcacactaagtttccagcttagaaaatactctagcctggtccttaacatattcattaagtaatatgaatattttaaggtccttctgtcccacaagaaagtagtaagtttaccctttgagacatcagactttctagagctggcccaactgtataaaattttaagaagtatttgaagtgtggaatcaacactatgaaaacagtgtgacaaaattaaacattatgttgaacccttttctagctttaactcaaaaatagaaatcatgagtcttctataacattaattttaaaaacacacagaagtgaaaagtgctattttccaaaaagtacaatgtttttccctactttatatcaacatggaatgatttcagttctcctgtactaaaagctggacttttaaaaaactagtattgcaatgtttaatgtgacgactttaatcagtagtagcttcagtttccgctgggcccctaattagtcttcgaattcctctttttcctgcaggaccttttggttttgcaaaactttgcttgtgtgcctgctgcttgggatgtacttcttcataaaggaagtctgcagtcaactcatccccattgtctatctcgatctttctaattacatccatttgtagttgtctttctacaatttctagcagagggctcttgcagctagaatacagcatccgctctcttatactgcatgtgtatccaggcattgaataaataaaactatggactctaaatagtctccttcatgggaatgtttatacagaaagaaatggtaacgagctgaatccttgggaatcctctttggcaaatctttcagttctgtatttgttgtgttggccaaaattataatttcattttttatatctatttccaactgcacatagttgagctgtctgttattcaatttttccaaagcctgaaaggcttctcgagaaatgggaaatgctactccttgtagtgtttgatgcttagtgtccacacccacgtcagtctgtacctcattgattttaatctgtcgtaattcttcctcagctgcagtcagtggggcaggggaagattgtgacagcaagtattttttatatccatgtaatgatacatcttcctttactgttccaaatatttcatctttaatgtggccacctccaaattccttcttcagagttgctcttgttgctgcatacaacattttttgacgaacatgagaatgatctggagaccatgcaatgaatatccattcatatccctgggcattctgagaatctaacctgaataatatatagcatggttgtttgtcctccaacaggggtaaaacaaaggaatcataatccttatcccaggaatctgaaggctgactatatgatccaatcacaagttgctcattttcaatagatattttcagaagtctgtactttccatttctggctctggcaaagatctctttaacatcttcacttgcttggatgccggtctggtgggacatggcggcggccgctagctcccggctccggcgctgagtgcagccagcggccccggccggcggctccaggaagtcttgtcactactcttattatttttcgagataaggtctcactctgtactcaggctagaaagcagtggcacaatctggactcaccacaacctctgcctcacaggctcaagtgatcctcctacctcagtctgccacctcagcctcccaagtagctggaactataggcgtgcatcaccatgcctgcctaatttttgtattttttgtagagacgaggtttcaccatgttgcccaggctggtctcaaactcctgggctcaagcgatccgcccacctcgaccttccaaagtgcagattataggtgtgagccaccgcacccggccatcaccactctaaatatgaagtaagtgtttaatatatgtttattaaatgaatgagtgaaagaatgaatgggtagatgatagaattcctccatcattggggttcccagagctccagagagaggcgtactctccaagacttctgaattattcccatctccaagaacactctttgctttttctttcatcccaaccctacccacctcttgagacccacttcctctaggaattctcccctgactattccaacccaccccgaatgcctgcatccctgaattccttatgctcactgctatgcaggatccctgtgcacattctggctggcctcattccctgttatcaagccttatcttgttgttgtgccctacagagcagccagcacaagggagctgctcagatagactcacacactggtcaacttgtccaggaacagaaaggcctgagaggagggaggttccggaggaagctctgccagattttactcagagcccagagttcaaatttcccccactgctggctcctccttatcacagctaggaaggatatcagatgaaattggggaaacagaggcaccaggcaggaaaaaaacccacctgttctcattcaaagctccaggcctaaattaggtaggtcagagagagagagggacacccagtcagcgttcctgagcaagctgtccgtggaagggaaagaaagaaaatgcaagcctcctccattcctcacccgttcctcacttcaggcagctcctccattctccctctttgcccctcctttctctggcctttggagccagacagacctgggttcaaatcctggttctgtcacttgctagttgtgtggctttggggccaattacttaactcctctgggcctgttttcctgtctgtgaagtagagatttttaacatagaatgacaaagacatattgacaatgagagataatatattactaaaaactctgcccaaaattcatagaggcaggaagtagaacagaggttcccaggggctaggagagggggaatggggagttattatttaatgggtgcagagtttgggatgatgagaaagtgctgggcgtggagagtgataacagctgtgccacactgtggagatacttaatgccaatgaagtgtacacctaaaaatggctagaatggcaaatttttattttatttatttatttatttactgagacagagtctcgctctgttgcccaggctggagtgcagtggtatgatctcagctcactgcaacctccgtctcctggattcaagtgattctcctgcctcagcctcccgagtagctggaattacaggcacgcaccaccatgcctggctagtttttgtatttttagtagagacggggtttccccatgttggccaggctggtctcaaactcctgatctcaggtgatccacccatcttggcctcccaaagtgttgggattacaggcatgagacaccgcacccggccagaatggtaaattttatatgtatattttactacaaaaaattatataattggccgggcacagtggctcatgactataattccagcactttgggaggccaaggtgggcagatcacttgaggttaggagttccagaccagcctgaccaacgtggtgaaacgttgtctctactaaaaatgcaaaaattagccaggcatggtggtgcacgcctgtagtcccagctacccgggaggctgaggcacaagaatcacttgaacctgggaggcggaggttgcagtgagccaagatcgtgccattgcactccagcctgggctacagagtgactctctctcaaaaaaaaaccaaaatggctgggcgcggtgcctcacgcctgtaatcccagcactttgggaggccgaggtgggtggatcacttgaggtcaggagttcaagaccagactggccaacatggtgaaacctcatctctactaaaaatataaaaattagctgggcatggtggtgcgtgcctgtaattccagctacttgtgaagctgaagcatgagaatcacttgaacccaggaggcggaggttgcagtgagccaagatcacaccactgcactccagcctgggcaacagagcgagactctgtctcaaaaacaaaaaacaaaaaacaaaaaacccaaaaagcttatataaccaaatggtggggggtgggcaggaccttcctcagtacctggcacctggtaggggtgctcagtgataaatagaagctattattattgctcttagcagctcctctcctgctgccccaaaccccttctcttcactcttcaggaagaaaatactagaaacccccagtctgagtatttaaactcctcaccaccaccatttaggaagcagaagttcctgcagggctggaagtttatgtatgcctccttggtcaggcagcaggcacctgggagatggaggcacttgggagatggaggcttctgggcattttctttcccttttttttttttttttttttttgagataggatctcactctgttgcccaggctggagtgcagtggtgcgatcacagctcactgcagcctcaacctccctggactcaggtgattcacccatctcaacctcccaagtagctgcgccaccacacccagctaatttttgtgttttttgatgaagaaggggtttcaccatgttgcccaggctagtctggagctcctgggatcaagcaatccgtttgccacagtctcccaaagtgctgggattacaggcatgagccaccacacctggccttcttttctggccaagcaaagacatccaggagggggtggcaaaaggaaactacctgccccccatggttcaaatatttattaatcatctggtgagctccctgctcatccttgtcagctcctgtctccctggcctgcctctccacagagcagaggctggggctcattctcaaaccccaaaagccagaactgagcccctgcttctcttgatttgagccctggtgggagaagggtgaaaaagagagaaatcaacaaggcatagaatagcgagggggaaatgccagttagcccaagaagagagtggggattgaggagcttgttttctatctctcttgaagttagaagggaaaaaagttataaataacaataggagtgaatgagttagaagtttctggttgccagagctttaaggcaatggaagagaatatagtctcctaggagaactttgaaaatggggcagggatctatctttataggccagggtttcctaacttcagctttaacctcagcatattcacattttggactagataatactacagtgtaggaaactgccctgggcattgtaggagggttagcagcattcctggcctccagcattcctggtagatgctagtagcacccctgctcctggccacgacaaccaaaaatgcctttattgtcaaatgtcttctgatggacaacattacccccacccttatttgagaaccactgatatatgctaaacaaagtgtttttctgcttggaaaccggggagaaaagaattgacctttatattctaggatgtgaaatgtaaaactcagccaggcacggtggctcacgcctgtaatcccagcactttgggaggccaaggcggggggatctcttgaggccaggagttcgagaccaacctggccattatagtgaaaccccatctctactaaaaatacaaaaattagctgggcatggtggtgggcacctgtaatcccagctattcagcaggctgaggcaggagaatcacttgaacctgggagatggcggttgcagtgagccgagatggcaccattgcactccagcctgggtgacaaagcgagactccatctcaaaaaaaaaaaaaaggaatgagttcatgtcctttgcagggacatggatgaagctggaagccatcattctcagcaaactaacacaggaacagaaaaccaaacactgcatgttctcactcataagagggagttgaacaatgagaacacatggacgcagggaagggaacatcacacacgggggcctgtcgcagggtggggggcaaggggagggagagcattaggacaaatacctaatgcatgcggggcttaaaacctagatgacgagctggtaggagctgtaaaccaccatggcacatgtgtacctatgtaacaaacctgcacgttctgcacatgtatcccagaacttaaactaaaattaaaaaaaaaaaaaagaaaaagaaaaaacaatacaacgtcaaactccacaaggggtaaacaacatgttgtgactggctggaagtcagggagaataaacataggccccatatcctaggaaattgtgaagctccagtcagctgcgcaaagtcacacagcaaggaccttgcagggtcgggagtggtgactccccaggtcctcagcaatgacaagccctgtcatgcaaatcagctccactgtggatggattccgctccccttctaaactcagatcttctggggttgcggcaggttgctaagcaagcattctctgggccttcctaagagccacatggaaaacagaagccttcaagaagagccaaggtctggaaggaagtttcccagcttcagatcttaatgtatccttgccctccccaaagccctagaacactgggccagagaatggcactgatggtgccattaagctccattaacaagtgcacattaagctcccctagtcccaaatcagtattatggatttttccttttgcctcaggctccagtgtgccctggcatgatactgttactgattctgtctttattgaaaatattttgttcaatatggatttttttttgcattaatttgattgctaaaaaatatggcattggccaggcacagtggggtgcacctatagtctcagctactcgggaggctgaggtgggaggattgtgtgagcctagaaatttgaatccagcctgggcaacatagaaagaccccacccctaaaaattttttttaatatggcattaaaatattgtttattttgattactgagttgtttgcatcccattgagtactatgactgaagtgagtgcctcactcccctcaccctagtcctggccctgctcaatgggtccctaacaggagagttcatgaggcatgtgtgaaggcagagaggggcccacaggctgcattctgcacacaaataggttttgtttggcttgcactatgtttgcaaaaatgtcttcacttgttgccaattttcttaaatcaagagaatcgcataaaaacccagatttctgggaaagaaaattggataatctgacaaccctacacatcatgggcaatagcttttgggacctggttagtggtttcccatttaggaaaggggggtgctgcccaatttcccttagccacaccctgccaactcctcccatttacaaggcccaccttctctcctgagcactggtgagctgcagccagcttgcaccatctcacaagagctgattgtcaacttttcagagtcggttaagcacagtcattataaaaaattaaattatataaacttacaattaaataaattatcttcaaaacaaaactcataacttcctaattattttactacactttcctattatctatgttcttgagattatgaatgtctattacatctgtgtggcggaagtgcaatactgtggtgtgctgctgtaaatctcctcccaactccatgctcagtgatgtcacattggtagcatgaacttggccatggtaagagtatggaaatcagcaaaactgcaaaacagggcttgatctattgtttcgttgattgttgagacttaaaatattgatggaggccgggcacggtggctcacgtctgtcatcccagcactttgggaggctgaggtgggcagatcacctgaggtcgggagctcgagatcagcctgaccaacaaggagaaaccccaactctattaaaaatataaaattagccgggcatggtgacacatgcctataatcccagctactcgggaggctgaggaaggagaatcacttgaacccaggaggcggagattacggtgagctgagatggcacctttgcactccagcctgggcaacaagagcaaaactctgtctcaaaaaaaaaaaaaaaaaaaactgatggagaaattgttaattatgtagattaaacttaatagtgtgtcttgtctgtagccattacgtaatgaatagcacaagaattcaaggaaatattcttccagtgtttgtaaactactatctgattcaccaaagaggttgctcacgtcattgaataaggaatgaaattcaggacaaaaattttcattgtttcactttcatcttcctcctcaacttaaatgagagtatcaaccaacattcctgtcaaaactacagttgtctatcattcataaccttaggttggttactggtacaagtattcctcaaaaatcaatgaaagcattttgaatgaatggctatatggaatttataataaggatatatatagttattccatatatataattatatatagtttttcccattttatggatgagaaaactgaatgtcagagctgggatttcaatctaggtctgctgtctccaaagcctatgccctttgtactctgcagcctccaaaggagagatggtaggacatgaaaggcctgtacatctcatgatcccagaagacaaaaaaaaaaagagaaaaacttgaaccaaacccatagacaaaacctgctccagagcctcattctcctccccatcagcaagatgctccttcagtctatcttaaatccctctgagtatggttctgccttctggaaacccccagagccaggaccaccattctcttacctgaaaggcagtagttgtctctgagagctggaggtccaaataaatctgctgcctgcttaggggtactgcaaagcagggaatgtgcagaatgtgggctgtttatccccaggccttgggggccctgcaggaggaaaactcagaaaaagctgggacaaaagctgggagacacaatgggcatccctcgtgctcaaaatcctgcccactcggcacaacagaagccacgagaatccccccactgccagcactcaggacctagctgtgcccatggcctgccagatttgttaaatttgctccacaggtgtgaacgccctgagggtcctgtgtggtcacccgtgtggaagggcagatgaggcctggcttggaaaccacctggcccccaagagatcttggtctacactggcaggagtgaatcaggagctgtggcttatccctccccaaagcagttctttttcccattttggtggaaggggcagcgaagcttgagaatgaagtttaggagcaccttcccaagagagggccaccttctccagaaagcctgcccagcttctctggccttcctgacctctctcagcattcaagcctgaaaccaagggcctagggctctatggcttcctgtgtgactttgggcaactcactctacatctctggtcctcatttgtgtaggagaaccaacaaatattgagtggctttccagtgctaaacacataaaaactttacatccctttccttattcaaatcctcctaccaactctatgagattgatattaggatcccctcattgtagcagaggaaactgaggaacagagaggttaggtaacttaccttgggtcacacagctggaattcaaactcagatctgggttgactcaaactccatggcttcacatcataaattatacagtacttgacacaagtgtagcaggaatgactccaccctcaactgcagggtataggaaataggtattagcttttgtataactcagtttaatcccagtcaattttagtttccccctccttctgcaccaggaaattttcgaagtgtccaaaggcaggggtggaagcactctgcctctgtgtcatctgcagctgattagtatcattgtgtcatccactgttcagctagtcattggctcacacatgggtgttttttgttttttgttttagagacaatatctcgctctgtcacccaggctggagtgcagtgccatgattgcagctcactgtatccttgaactcctgggctaaagccatcctcccgtctcagtctcctgagtagttgggactacagatttgtgccactacgcctggcttctggtggcttttttttttactacattcatgccagccttgatgttccaggattccagggaggcaagttcccatttgcccagcctcacaatggggccattctctttctgctcgcctaggctgtggccccaaatacacagtagagttattcttgctggaactcatggccacctacatagtcatcgcttttcctctgccaccagcctggaggaagcttctttagtttctaaagggaagcccactccccttaaacctgccccacccagctttcacttatggtatttccttcgactatgtggccgatgttcagaagcctctccattcccctaaaggctgggtttctggagaactaggccaggaagcaactttatttctgcagcatcatcttctgaggcaacgagcacaggacagtccagctcctagaagaggggccagtggtggccatgaagtgttaaaatgccagtaagggaaaaatgggtaaggtccgcaaaacatcacatcaagttcgggcgcagtggctcactcctgtaatcccagcattctgtggggccaaggtggaaggatcacatgagctcaggaattcaaggccaacaaaatgagaccttgtttctacaaaaagtaaaaaaaatagctaggcatggtgatgtgctcctgcggtcccggctactcggaaggctgaggcgggagaatcacttgagcccagaaggttgaggctacagtgaaccaagattactccactgcactccagcctcactccagagtgagactctgtctctaataataataataatcaataactatatctgaacttattgttattattatttcttccaatttcctttttcttagagccagagatattatagcctggcaggacttaatagcaataataatcatggctaatatgtgttaagtgcttgttatggccaggcattgtgataagcgctttacctatattatttatttttatttttatttttatttttattttgtagacggagtcttgctctgtcacccaggctggagtccaggggcacaatctcagctcactgcaacctctgcctggaggttcaagtgattctcctgcctcagcctcctgagtagccaggattacaggcgcccaccaccatgcgcagctaatttttgtatttttagtagagacggggtctcaccatgttggtcaggctgatctcgaactcctgacctcaggtgatctgcccgctcggcctcccaaagtgctgggattacaggtgtgagccaccatgcccggccaatattatttcatttaatgctcataaaagtcctacaaggcacttatgatcctcattttaagaggaagctgatcctcagagggcaaaatcatcttgcatgaggtcatccaatcactgagccacaccattcagatgcaccacaagactcggcagtgttcctcaggctgcccagtcaccagcatcgggaaccgctgtccatgagcaagtagatgggacgggtgcctccctggatgaggatgtgatgaaatgctggcgtgaactggttttgccatgcagaagcaggaagatggctaggaaagacttaatgtcttacctagccatcttccttccaaggatcaaaaggtccaactgtaggtccttcagccaggttggcccacctgtcaatggcttcccagcccacactcagaagcgttgcccagggttctaggctggggccacctcctgcctgtcttccctcttttctggaagatgctaggaaagtactgccctaatccagggtcccctcattcacccagaagtgactgtgggtacaaggaagtgggtggcaccaccaacaggtggaacaggtgccaggagtatagtcctgggaggtgacagggcaggcctgggaccagaagctgcaaattcctagtccatctactgcctggatgctcctgagctgatattaaaggcccggggcactatcacttcctgtgtgactttgggcagctcactctacctctctggtcttcatttgtgtaacagaaccaacaaatattgaatgactttccagtgctaaacacatataaactttacattacacacacacacatgctgtgacagagttaaccttcctctaatatgagattcctcttcttctatagtaattggacttttatttatacctaggcaatgtctgcccagaataaagactttattttttccagccttcttttcagctaggtatggccatgcgactactccctggtcaacaaggataaacgttgtgttggtaagtgcatcttccgggcaaggctcagctggataatttttttactccttgtgccattgactgaggtcacttggtggagtttagctggtacacgggttggctcggagggtccatgacggcttcactcatgtctggcatgctggcaggggcagctggaaggctcagccagaactgcgaattggaacatccacatgtggcctctccagctctcgggagagttggactttcttacatggcagcccaggcttcgggagcaagtatttcagcgatcaaagtagatgctctatggcctgttacaactgagcctcagaaggtacttgccatcacttctgcctatgctaatagacctactgtttgggtcaaggcagtcacaagtccaccaacatttaaggagaagggacagagaacacttagaaactttacacacacacacacacacacacacacacacacacacacacacacgctgtgacatagactactaaccttcccctaatatgagattctttttctcctatagtaattgaaccttttatttatagctcagtgaggctgagtctctcactgaccaactgctcaatgagagaagtgtcaaagaatttgcaacctgctgggtgcagttgctcatgcttgtagtcctagcactttggaaggtcaaggtgggaggaccacttgaggccaggaagtcaagaccagcctgcgcaacagggcaagaccccatctctgccaaaaataagaaaaattagtcatgtgtggtgacgcaaacctgtagtcgcaggttctcacgggctgaggccaggagggtggcttgagtccaggagttggaggctgcagtgagctgtgattatgccactgcactccagcctgggtgacagagcaagaccctgtctcaaaaaaagaaacacacacacacaagacaccacagcaatcctggaccacttgggtctggaccttaagtcagagaaaaataaacttccattttgttaaagccaccactcccttggttgtctgtcactcacggccaaatgcaatcccaacagaaacacacatatgcacagacaagcacatgcatacacacatactctcaatgacagtgcacgcggcccacaagacacaaggagagacgtaaatgttgaaatctcactaggttaggagtattcatctactcacatgaactcataccacacaccagtttcaggagctgtccttccccgaggttcacatctcactccgcacttcccctgccacaaccctcactgtggtatattataattagaatatacttgtccatatcacccttcccctggtcaacccttggaccccatctgtcttgttcatcatcattcatttagcaccaagcacaggacttcaatcgacatttgaccaggtttgtattttacaaacagcctgcaggtgacactttgagctgctggggactagagtctgagtgtaatgagactgatgaggagcctgcctggatgtgaggagaccctgaactggagcctcagtactggagacggggatgaaatggagagagcaggaggtgggattgacaggcattgggagtgattggggggcgagggagaagtaggagtcaaggagcgcacccagatttctaatctggacgatgcaataacaaatggtggcactctttgctgacagcagaaacaaggggggagcagaagactcaggagaaggtaacaagctcagttttgcctatctgtatttcaaatgcctggggggccatccaggtggactcatgcaggaggcagctagacggttggatggaacaaaagactagtgaagacatgaccacgctttctgaaacattcccatgcaagtcattcattgtccagacaaagtgttggaggaagcggggtgcagggcagggccctgggttggaagttgacagacccacattcccttcgccactactacctgatgtgtcatcttgatgggcaagggacactgccttctggcttgtacttttctacttagttgtaaaaatgagaagcctgcctcaaacctctgtgtttccttctagctctcagatgctatggctaaatatttgaaatatttgcaggcctaccctctgcaggctactgggctgggccctgaccccatttccacttctctcaaacaacaacaacaacaacaacaacaacgacaacaaccaccaaaaagcaggtcaactgcaggaggaaactgggaggtgaaacacactgtaagctcctctgctccaaactgctcttctttttccccattccctgcaccaaggtctctgtccacccaatacaccagaatgccctccttaggtctccaggcccctccagctactcccaacaactatttcccaaaagaccaactaggaataaaaattatccccattcctcccctttgtgtcacactttacatttctactttctccagtataaatgatatttactgcacgggaaccatatggtaggcaccatgccaggctctgggatgaagaccacacagaccctaccctcaaaaaagcagggaagagagttagcaatgtaattcgaggtgaatgaaccacacaggggctgtaggaacatagatgaagggaagtggtgtgtgtgtgtgtctgtgtgtgtgtgtgtgttcaggaggatcctcaaaccctgtgaagttttgggttttttgtttgttggcatgtttgtttaagatagagtcttgctttgttggccagcctggagtgcagtggcttgatctcagctcaccgcaacctccacctcccgggttcgagcaattctcgtgcctcagcctcccaagtagctgggattacaggcatgcaccaccacgcctagctaatttttgtatttttagtggagacagcgtttcaccttgttggccaggctggtcacgaactcctgacctcaagtgagccacccacctcagcctcccaaaagtgctgggattataggcatgagccaccatgctcagccatttgtttgttttctgatacagggtcttgctctgttgcccaggtgggagtgcagtggtgcaatcatggctcactgcaacctcgacttcccaagctcaagcgatcctcccgccttagcctccctcgtagctggaaccacagatgtccgccaccatgcccacctaattttttacattttttgtagggacaggatcttgctgtgttgcccaggttggtctcaaactcctgagctcaagcaatcttcccaactttgcctcctacaagtgctggggattacaggtgtgagccactgcacctggcccctgtgaagtttttataaaacattagcactggaagggatctcacagaccaattagtcccactccctcattttacatgtgcagaaactgaggcccaggctggccacgcatggtggcttacacctgtaatcccaacactttgggaggctgaggcaggaggatcatttgagcccagcggttcaagaccagcctggacagcataacaagaacccccatctctacaaaaaaaattaaaaattaggccaggtgcggtggctcacgcttgtaatcccagcactttgggaggccgaagcgggcagatcatgaggtcaggagatcgagaccatcctggctaacatggtgaaaccccgtctctactaaaaatacaaaaaattagccgggcatggtggcaggtgcctgtagtaccagctactcgggaggctgaggcaggagaatggcgtgaacccgggaggcagagcttgcagtgagccgagatcgtgccactgcactccagcctgggtgacagagcaagactccgtcccaaataataataataataataataataataataataataataatatcttaagaggtataagagctaatatgcttccttccgggcttcattctaagctctctagatggattgattcgtttattactcacaacatacctgagagttaggtttttatgttcccctaatatgacaatattgagtcttaggttaattgacttgcctgaggtcacacagttaacacaatactgaatacaggtagtccaaataaagagccatgagcgtgggggggaattgcctggaggccttaacatatgatttctataccctaccctcagaaagtctgattctctcggcctgaagtgaacaagctggaatttgcattttagccatgcaccctaggtgattatggtttggtggctatcggaccactctctgaaaaaacccagttcgaatgtaccttttttctcaattcagagttttctggcacaatccctcccttccttgggactccctgtcctcaagggaccccgctttccggagtctgctgggaataagggtactctggaaacggacgtatgccccctggtggtcagaaattagaggctaggcgctacagccagcagggtcccgtcaaccgcacaaatttgtgaacttttctagaatttcgttcagccagtattactgaggtgccactatgggccagcactgagccattgtaatacacagcacattggagagaaagaagacttctggggacagaatttttcaaggtgactgctcacctattttcatccgtggatacaaaggcatcagtttcaagctgcaattggacaaatttcacctggtctaagtattcgtatctggcaacatatagctctgatcttaggtctttaggaggctgaaaaagagttttttgaaaaaggctgagtccaccctcgggaaggaaacacaggagcatgtatatttgcagggctccaaggctttgtagtcaggctgttccagctctgttacttcaggctctgggacccgggagcagttatttcatctttctaagctgcagctgcttcacctgaactatgtgaataataacaacacctgtctcaaaggtttgtgtgatgaaatggtctcttagtgcctggcacaagataaacgttcaaaaaagttgtaggtattttgaaatataatactttgtagttatataccataaagtatacactatatataccagggttctaacaccagccttaattcattcaccttaaaaaggaacacaaatgggccgggcgcggtggctcacgcctgtaatcccagcactttgggaggccgaggcgggtggatcaactgaggttgggagttcaagaccagcctggccaacatggcgagaccctgtctctactaaaaatacaaaaattagccgggcgtggtggtgcgcgcctacaatcccagctactcgggaggctgaggcaggagaatcgcttgaacccgggaggtggacattgcggtgagccgagatcgcgccactgcgctccagcctgtgcaacaagagcaaaactccgtctcaaaaaaaaaaaaaaaaggaacacgaataattcttgaggccaggcacagtagctcactcctgtaatcccagcactttgggaagccaaggtgggagaatcacttgaggccaggagttggagactagcccagacaacatagtgagacccctgtctctccaaataaaaaaaaaattagccagacatggtgtcatgaaccggtagtcccagctatacaggaagctgtcgcaggaggatcacttgagccctgtagttggaggcagcagtgagccactcctgcctgggtgacagaccaagaccccatctaaaaaaaagaaaaaactcttgatccactgtagttgagagacaagatttcctccagttttgaatcctctaatatgtgatgcatagacatctaaactattccacactgttggtgggattgcaagctagtacaactttgaaaaattgtttgatagtgtctgctaaaactgaacatatttatggcccagcaatttattcttaggtatattcccaaaagaaatgtttacatatgttacccagaaaacataaacaagcatgtttatagcaatactatttataacagcctccaagtggggaaatatctaagtgtctatcaacactacaataagtttttgtgtgtgtttgtttgtttgttttgttgagatgaagtttcgctcttgtttcccaggctggagtacaaaggcaaaatctcggctcactgcaacctccgcctcccgggttcaagcaattgtcctgcctcagcctcctgagtagctgggattacaggtgcccgccactacgcctggctaacttttgtattttagtagagacggagtttcaccatgttggccaggctggtcttgaactcctgacctcaagtaatcggtccgccttggcctcccaaagtgccgggattacaggcatgagatatggcgcccggcctagatgtttattttttattttatttttattttattttattttattttattttattttattttattttatttgagacagagtttcactcttgtcgctcaggctgcagtgtaatggcagtctcggcttactgcaacctccacctcccaagttcatgcaattctcctgactcagccttctgagtaggtgggattacaggcgcacaccaccctgcccagctaatttttatattttagtagacacgggattttaccatgttggccaggctggtcttgaactcctgaattcaagtgatccgcctgcctcggcctctcaaagtgctgggattacaggcgtgagccaccacgcccggctccagctacatttttaaattgtggtattttcatagactagaacactacatgcagtaacatgagtaaatttcacaaatataatgacaaaagaagccagacactgaagagtccataccgtatgatttcatttatataaagtaccaaatggttgaaatgaaatgccattagaaactggaatactaattgcctttaggtgcagagtggtgattagaggggggctaaaggggtttcagggaggggattgccaataatgttctatatcatgatctgtgtggcagttatacaaagtgtctggactttataaaaactaatcagactgattgcttatgatttgtgcacttttctatagtatggattcatagatttcaatgaaaagttagattttaattaaaagtttacctaaaaactctccgtgagtccctcatgaccaatcacagaacacacccaggcctcacttatcataagcccagagtcccccagggtatcagaatcagaaatttaatgccctctggggatgggagatgtggcctcaggcccatgagctgcaaccaggtttcctgctaaaagtcaagaacaaaagagttgtcttgtagataaaaacaggttccagaaaaactgcaccagagcaaagagctaggtgtctgcctagagcctgtgggtgaaaaaatcacccctccaacactgtgtcaatcagaggggtggcacctgagtacacaccagacttgctgtttgagaaacccagggcaagaaattagtaaaaatcacccacaggcagtgaaactgcataaaatacttgcatagagaaatacaaaatagcctcacaggagttcgtccaaaacctagagaatgagaaagaccctgctccctgaggaaatgaatgaagaaacaaatgccatcataaacagatggcagatgcaaggaatcagaaaatgtgtgcaccagaaatcacagataaaaggacagtttgaaaaaaatgtttcaattcatgaaacacaaatgctaatttaaaagaaatgtgtttcagactgggtgcagtggctcacacctgtaatcccaatattttggaaggctgaggtagcaggattgcgtgaggacaggagttttagaccagtctgggcaacaaagtgagagcctatctctatttcaaaaagaaaaaaaaaacttttttgttttttgagacggagtcttgctctgtcaccaggccagagtgcagtggtgtgatcccagctcactgcaacccccacctcctaggttcaagtgattctcctgcctcagcctcccaagtagctgggattacaggcatccaccaccacacccagctaacttttatatttttagtagaaacggggtttcaccatgttggccaggatggtctcgatctcttgaccttgtgatccacccgcctcagcctcccaaagtgctgggattacaggcgtaagccaccacacttggccctttttttttttttttttttgatacggcatcttgctgtcatccagactggagtgtagtggcaccatcttgactcactgcaacctctgcctcccgggttcatgccttctcctgcctcagcctcccgagtagctgggactacaggcgcctgccaccacacccggctaatttttgtgtttttagtagatacggggtttcaccatgttggtgaacaggctgatctcgaacccctgacctcaagtaatctgcccgccttggcctcccaaagtgtgaggattacaggtgtgagtcaacatgccaggccaaaaagaaaaaaaaaaattagataaaagttttgttaaaaaaacaaacaaaaaaaacctgggctgggtgtggtggctcacgcctgtaatcctagcactttgggaggctgaggtgggtagatcacctgaggtcaggagttcgagaccagcctgactaacatggtgaaaccttgtctctactaaaaatagaaaaattaggcaagagtggtggcacatgcctgtaatcccagctacccgggaggctgaggctgcagtgagccaagatcgcatcactgcactctagcttgggcaacagagtgagattctgtctcaaaaaaaaaaaaaaaaaaaaaaaaggaaaaaacctaaatgtctatacgatttatatttctaaaattttagttctttttcaaacccacctttcctcccataatatctcagtctcactgtattttctttcttctttcttcttttttttttttgagacggagtctcgctctttcgcccaggccggactgcagtggcgctatctcggatcgctgcaaactccacctcccgggttcacgccattctcctgcctcagcctcccgagtagctgggactacaggcacccgccaccgcgcccggctaattttctgtatttttagaagagacggggtttcaccgtgttagccaggatggtctcgatctcctgacctcgtgatccgcccaccttggcctcccaaagtgctgagattacaggcgtgagtcactgcacccggcctctcatcgtattttcaaacccaccttttccctcataatatctcactctcatcatatacattctacttcttcctttaaatatttgaacattttaaacatatttcttttatattttattttattttaagagacggggttgccaggcgtggtggatcacgtctgtaatcctggcactttgggagaccgaggggggcaaattgcttgagcccaggagttcaagaccagcttgggcaacatggtgaaaccccatctctacaaaacatacaaaaatgtggccgggcgtggtggctcacgcctgtaatcccagcactttgggaggccgaggcgggcggatcacgaggtcaggagatcgagaccatcctggctaacacggtgaaaccccatctctagtaaaaatacaaaaaattagctgggcgtggtggcgggcacctgtagtcccagctactcgggaggctgaggcaagagaatggcgtgaacctgggaggcggagcttgcagtgagccgagatcgcgccactgcactccagcctgggcgacagagcgagactccgtctcaaaaaaaaaaaaaaaaaaaaaacatacaaaaatgagctcggcgtgggtgcacacctgtggtcccagctacttgggaggctgaggtgggaggatctcttgagcttgggaggtcgaggttgcagtaaccagaagttgtgccactgcactgcagtcccagcaacagagcgagaccctgtctcaagaaaaaaaaaaaaaaaaaaaagggtctcgttctgttgcctggttggagtgcagtggtgtgatcatggctcactgcacccttgtactaccaagctcaagagatcctcccacctcagcctcctgagtagctgagattacatgtgtgcattactacatccagctaaacaaaacttagtaaacagttaactagatcctgctatacagtgaattaatgaattagaacaaacatgaggaaatcattcaggaagtggtaaagagatagaaaataagaaagacagaatgaaagacatggtgtatagcatgagaagctccaaaacaggaattcagaaggagaaaaatcacaacagtggagggaaggcagcagacaaagaggtaatgggggaagtttcctgaactgaagaaagacaggagtttgccagctgaagaagcagaagtcctgagtaggataaataaaagcaagtctatatctaacacattcctgtgggattgcagaacatcaagggagatagaaaatcttaaaggctactaaagagaacagatacctacatcagaacaagaaacagactgataggggatttcatgtcattgcaggagtttccagaagacaatgacatgtcatcaaagtgttgagggaaataactaccaaccaagaatcttatttctagctatacttacattcaaaagtaaggctgaaataaagttgttttcagacacataaatattaagaaagtttattacttatagatatttgctgaaagaactactaaaagattatttcagtatctatctttattgtctttacaaatccagaaggaaggagtgaaatacaagaagaaatggtaaatatataaattggtacatctaaataagtattgaccactaaaacaataaaataaacaaccaaaccaaatattaacgtagaagatgggaatggaaagttcccatctctatcttgttcagaagagtagagaaactgaaaacatttaaaatgaaagtgtaaatttacaaatactagaaatagaatgtatacctttcaaattattggaggggaaaaaaaagagaataaaaagaaacaacagcaaaaggcaggaatagagggcaagaagcacaaaaaatgatgaaaaaggtcaggtgcagtggctcacgcctgtaatcccagcactttgagaggccacactgggaggattgcttgagccaggagtttgagatcagcctgagcaacataactataacctgtctcttaagaagaaaagagatcgggtgcggtggctcacgtctgtaatcccagcactttgggaggccaaagtgggaggatcaccctaggtcaggagttcaagaccagcctggccaacatggtgaaaccatttatctactaaaaatacaaaaaaaattagtagggcgtggtggccagtgcctgtgattccaactactcgggaagctgaggcaggagaatcccttgaacccgggaggcagaggttgcagtgagctgagatcgcgccattgcactccagcctgggcaacagagctagagtctgtctcaaaaaaaaaagaagaagaaaagaaaagaaaagaaagaggttggggtgggggtggaggcgggggagggagggagaaaagaaagaagaaaataatgaaaaaagagagatacaaagtaagattgtaaattgtagcatattcatgctgtggagtactacacagctcataaattgagtcaacatgatctacatgtatacatatggacagatttcaaaaatatgttgaagggagaaagtgatttgcagattttttttttttagacagagtctcactctgtcacccaggctggagtgcagtggcgcaattttggctcactgcaagctccatctcctgggttcacgccattctcctgcctcagcttcccaagtagctgggactataggcacccgccaccatgcccggctaattttttgtgtgtttttagtagagatggggtttcaccgtgttagccagaatggtctcaatctcctgacctcgtgatctgcccaccttggcctcccaaagtgctgggattacaagcgtgagccactgcacctgccctgatttgcagattttatgagtcatatacatcatatacaatgtacatgtactttttttttttttgagaggagtctcactctgttgcccaggctagagtgcagtggtatgatcttggctcactgcaacctccgtttcccaggttcaagtgattctcctgcctcagcctcccgagtagctgggactacaggcatgcgccaccacacccggttaatttttgtattttttagtagagatgaggtttcactacattggccgggctggtctcaaactcctgtcctcaggtgatccacctgtctccacctcccaaagtgctgggattacaggcatgagccaccgcgcccggcctacatgtactttttttgttttttgtttgtttgtttgtttgtttgttttgtttttttagacggagtctcactgtatcgccaggctagagtgcagtggtgtgatctcagctcactgcaacctccgcctcccgggttcaagcaattctcctgcctcagccgcccaagtagctgggattacaggcacgtgccaccacaccaagctaatttttgtatttttagtagagacagggtttcaccatgttggccaggctggtcttgaactcctgacctgaagtgatccacccacctcagcctcccaaagtgctgggattacaggtgtgagccaccacacccaccccttccttgctctttcgaaacacacaggagctgggagcggtggctcagtcctataatcccagtgctttgggagactgaggtgggcagatcacttgagaccaggagttcgtgaccaacctgggcaacacagtgaaacctggtctctacaaaaaaataaaacattagctaggcatggtagcacactcctgtggtctcagctacttgggaagctgaggtaggaggatctgcttgagcccaggaggtcaaggctacagtgagctgtgatcacgccactgcactccagctttcaggccactgcactccagcttggttgacatggcgagaccttgtccaagaaaaaaaaaaaaatagaaaacctcaggaaactccccctctgctcccccaccatggatatgaacaatgaagaatacagccccaattgctactggaaaacacccaacaatgatgaaagcagtcagccttaggatgaagtcaacaatgaattcagtaggacggagatggaaaaaacccgagtcatggaaacatcactgaatcaacaagcctgaggcttaccttactgtgtattttttgttaagtgaactaaataattttttttttttttgagacggagtctcgctctgtcgcccaggctggagtgtggtggtgcaatctcggctcactgcaagctcctcctcccaggttcacgccattatcctgcctcagcctcccgagtagctggtactacaggtgcccgccaccacgcccggctaattttttttcttgtttttcagtagagacggggtttcaccgtgttagccaggatggtctcgatttcctgacctcgtgatttgtctgcctcggcctcccaaagtgctgggattacaggcatgagccaccgcgcccggcgaactaaataattttcttattggctatgccactttgcattcggttttctatgacttgcagccaaacttatagtaaatgatacaatggatatggagaagtggagccatataggactattagggaggtagaattagcaagattcagccaaaagttagatatggtggtgagaaagagagaagtgtcaagattgatcctagacttctggcttgagtggtaccatctctgagatggggaacatcaaaggaagatcaggatggggttagggacactagtggagatcatctgaacagcttggctgtgttgggttcagggaatctgttggaagtcatctaactagagatgtctgaaaggtagttaaagagtatactgtgttgaatagtatctccccagaatgcaggtccacctggaacctctgtttatgaccttacttggaaaccaggtctttgcagatgaaataaggtaaattgagatgagttcatactggattagactaggcaccaaatacaatgactggtgtccttatgagaagaccatgtaaagacacagtgaaggccgggcacagtagctcacacctgtaatcccagcactttgggaggccaaggcgggcggattccttgaggtcaggagttcaagaccagcctatccaacatggtgaaaccccatctctactaaaaatacaaaaattagccaggtgtggtggtgcgtgcctataatcccggctacttgggaggctgaggcattagaatcgcttgaacccaggcagtagaggttgcagtgagccaagattgtgccactgcactccagcctgggtgacagagcaagactccatctcaaaacaataataataattaaaaaaaaaacacagtgaaacacataaagagtgctatgtaaagacagaggcagagattagaatgatgcctctacaagccaaggagtactaggcattgctggcaaccaccagaagaaaggagggaggtctgggacagtttctgccttaactttctccttaagtcaaggaaccacccttgatttaagacttctggcctacagaactgtgagagaatacatttctgctgttttaagccaagtttgtagcagtttgttacagtagccctaagaaactaatacaaaaagagatgtgtgaatttgaaatatagatctgggagccaccagcaaagtagttattgaactcttgggagtagattagattacctcaggagagtatagaatgagaagcgaaaagaaggccaagaacaaaccctgagcaagactgacattgatggaaccgaaagaagaaaaggagtggacaaaaaacagtgagcaggagcagcagagagaggtgatttggaagtcaaggggaaagaggtatctaaagaaagaagtgttcaatagtctcagtggtgtagagatattacatgtaagaaaaactgaaaaagagtccattgggtgtggcaatggaagtcacttgtcttccctaccaaagccgtttcagaagagtgggaaggacagagatacgaatgctatgattgaagactgagtggccgatgaggacattgaaatggccaccattcttttaaagcctggggctacgaaaggcagagtgagaatggatgattctccagaatcaccttccagaaagggaattagagtctttggtgggttttatgtttcattttgagatgaaagagatttaagcatgtttacaggctgaaaaaaaggatcttgaaaaaggatcagtagaagaaagtttaaaattgcaggaatagaatgtggagaccaaaaaacagaaattcaaactagtagatataacttgttagatctttaagacaaaaagcgaatgagagtctttaaggaggggccataactcaccattccctaagtgggggctgtgcatggtgactttcttccaaagaaggcagtaaaaaggaagaaaataaagtaactttttaagtggagaaacctgacgaactacctcacgccagcgataagtcacttgatagtacgtatccttgacatgatgtgatgtgatgagaatggctctttctctctacgatcttccaaaaacatattaccctagtctaatcatgagaaaaacaacagacaaatcttaattgagagataaaaatatacctgaccaggccaggtgcgatggttcatgtctgtaatcccagcactttgggagactgaggagggaggatcacttgaggccaggagttcaagacaagcctgggcaacatactattacaaaataaaaacaggccaggcacagtggctcatgcctgtaatcccagcactttgggaggccaaggagggcagatcacttgagttcaggagttcaagaccagcctggacaacatggtgaaaccccagctctactaaaaatacaaaaattagccaggcatggtggcaacacctgaggttccagctacttaggaggctgaggcatgagaatcccttgaacctgggaggcaggggttgcagtgagccgagatcacgccactgaactccagcctgggcgatggagtgagactccatctcaaaaaagaaaacaacaacaaaaaaataaaaacaattagccagccagccatggtaatgcattcctatagtctcagctacttgagaggctgaggcaggaggatcacttgagcccaggagttcaagactgcagtgagccgagattgcgccactgcactccagcctcgacaacagagtgagaatctgtctcaaaataaataaaataggccgggcgcggtggctcatgcctgtaatcccagcactttgggaggctgagacgggaggatcacgaggtcaggagatcgagaccatcctggctaacacagtgaaaccccgtctctactaaaaatacaaaaaattagccgggcatagtggcaggcgcctgtagtcccagctactctggaggctgaggcaggagaatgccatgaacccgggaggcggagcttgcagtgagccgagatggtaccacagcactccagcctgggccacagagcaagactccgtctcaaaaataaataaataaataaataaataaataaataaataaaataacagattggcaaaagagtttgtgacagagagaattatggccctctagagatgtccacatcctaatccctagaatttgtaaatatgttattatgtggcaaaaagactttccagatgttattaaggaacttgggatagtgaagcgagattgttctgaattatctggatatgtaatcacaaagatccttatgagggaggcaggaagaaaggtcagcgtcaaagagattgaaatttgaagatgctgtgctgctggctttggaggtggaggaaaaggccatgagccaaggaatgcaggctgcttctaaaacctggtaaaggcaaagaaatagattctcccctagagcctccagaaaaaaaatgcagtcctgcttccagaattgtaagataataaatttgtgaggtttcttgtgtttgtttgtttgtttgtttgtttgagacagagtctcgctttgtcacccaggctggagcacagtggcgcaatctcggctcactgcaacctccgcctcctgggtttgagtgattctcctgcctcaacctcccaagtagctgggactacaggcttctgccatcacgcccggctaatttttgtatttttagtagaggcaggatttgacgatgttggccagggtggtcttgaactcctgaccttaaatgatccacccacctcggcctcccaaagtgctgggattacaggcgtgagccactgtgcccggccaatttgtgttgttttaagccactaaatttgtggtaatttgtttttaaattttttttttgagacagggtctcactgtgttgcccaggctggagtgcaatggctcaatctcggctcactgcagcctcgacctcccaggctcaagcaattctcccacctcagactcctgagtagctgggaacacaggcatgcaccaccacacttggctaattttttttgatgtttttgcttttgttttgaaataaggtcttgctctgttgcccaaactggagcgcagtggcataatctcagcctactgcagtcttttttttttttttttttttgagatggagtcttgctctgtcacccaggctggagtgcagtggcgcgatctcgactcactgcaacgtccgcctcccggattcaagcaattctcctgccttagcctcctaagtagctgggattacaggcgactgccaccatgcccagctaatttttgtatttttagtagagacagggtttcaccatgttggtcaggctggtctcgaacccctgacctcgtgacccacccgcctcggcctcctgaagtgttgggattacaggcgtgagccaccacgcccagcctactgcagtcttgacctcccaggctcaagcagtcctcccatctcagcctcgcaaacagctgggattacaggtgcgagccaccacaactggtaatttttttttttttttaaagtagagacgaggtctcgctacgttacccaggatggtctcgacctcctgagctcaagcagtcctcccaccttggcctccgaaagtgttgatattataggtgtgagccaccatatccagccatttttttaattaaaaaaatgtttttaattggaatagcttttaaggtacaagtgatttctggctacatggatgaattgtaaagtggtgaagtctgggattttagtgcacacatcacctgagtagtgtacattgtacctgatatgcagttttttatcactcacctcccttccaccctcccctcctgagtgtccatagtccatgatatcactctgcatgcgtttgcatatccacagcttagctcccacttctaagtgagaacatacagtatttggttttccattcctcagatacttgacttagaataatgtcctccagctccatccaagttgctgcaaaatacattattttgttctttttatggctgagtagtattccatgactgggtgtggtggttcatgcttgtaatcccagcactttgggaggccgaggcaggagggctgcctgaggtcaggagttcgagaccagtctggccaacatggtgaaaccccgtctctactaaaaatacaaaacaattagctgggtatggtggcgtgtgcctgtaatcccagctactcgggaggctgaggcaggggaattccttgaaccagggaggtggggattgcagtgagccaagatagcgccactacactccagcatgggtgacagagtgagactcctgtctcaaaaaaaaaaaagaaaagaaaagaaaaaagaaatctccatactgttttgcatagaggttatactagtttacattcccaccagcagtgtataagtgttccctttttatggggcaatttgttttagcagcaataggaaattaataggggttaaaagctaaatcaaggaaatctcttagaagtcagaaaaaaaggctgagagcggtggctcatgcctgtaatcccagcactttgggaggcccaggcaggaggatcacttgagcccaggagtttgagaccagcttgggcaacatggcaagacctccatctctactaaaaatacaaaaattagccaggcacggtggcgtgcacctgtgggcccagctactcaggaggctgaggtaggaggatcgcttgagcctggaagtggaggttgcagtgatccagatcgcgccactgtactccaccctgggcaacagagtgagactctgtcttaaaaaaaaaaaaaaaaagtcacaaaaaagacaaagaaacataaaatagtagagacatataagaaaactagaatatcatttcaggaggtccaacatccaaccaatagaagttgcaaaaaaacacattaaatacaagtgagaaaatgatttttttaaaaattacaggaatatttccaagaattgaagaacatagatttcctaaggttggaaaagtctactaaatgcccggaaaaataaagaaaataagattttcaccaaagcatagcctcaggaaattcagatttttagggattaaaaaaaatccaaaaacttttagaaagaaaaaaaaatcttatacaaagaatcagaaatcaaaatagcatcatactggccaggcggtgggtcactcctgtaatcccagcactttgggaggccgaggcgggtggatcacctgaggttgggagtttgagaccagcttgaccaacatggagaaactccatctctactaaaaatacaaaattagccgggcatggtggctcatgcctgtaattccagctactcgggaggctgaagccggagaatcgcttgaacctgggaggcggaggttgcagtgagccaagatcgcgccattgcactccagcctgggcaacaagagtgaaactctgtctcaaaaaaaaaaaaaaagcatcatacttcccaatagcaacattgcccatagaagacaaaggggaagtattttcacaatttgtagagtactgttaccatactctatatccagccaaaccttcaataaaatgctgctgtacaaaaatacatttttagacatcctgatctcaaaaaaagtatctctatgtaccatgtctcaggacactattagagaatgtgctttaccaaaacaagaggataaactacgaaagaggaagatatagggttcaacgctgaaggcaagcaaagggaatgcccaggacatcagtcaagagaagtctctgggcagtagctacgtacagggagaaaattccccagattggaaccgaacagaagcttccaggctaggcatggtggctcacacctgtaatcccagcactttgggaagccaaggtgagcggatcacttgagcccaggagcttgaggccagcctgagcagcatggcaaatccctgtctccacaaaaaattcaaaaattagctgggcatggtggcatgcatctgtagtcccaactacttgggaggctggggtgggaggcttccagaaaggaggtctcctgggggaaaaatggagctgagacatgatctgagaggttcaaatgtagaatatcatattagaagtatttttttaaccatttttttattattatactttaagttctagggtacatgtgcacaacgtgcaggtttgttacatatgtatacatgtgccatgttggtgtgctgcacctgttaactcgtcatttacattaggtatatctcctaatgctgtccctccctactccccccacccctgtgtgacaggccctggtgtgtgatgttccccactctgtggtagaagtatttaatgaagatgctgggaaactgaacctatgaaaaacattaggcattttcttaactccagaaaaagcaaaacatggttcaagaaaggaaatgttattaaattttgcctggtcagcagtgaacaatatttacaaactcatagacaaggaaatgctgaatatggatttaagtaaaatttataatacatccataggatggtggggagggggagagagccataagaaggataaaatctttttttttttttttttgttttttgagacaagagtttcgctcttgttgcccaggctggagtgcaatggcgcgatcttggctcaccgcaacctccacctcctgggttcaagtgattctcctgtctcagcctcctgagtagctgggattacaggcttgtgccaccatgcccagctaacttttttatatttttagtagagacagggtttctccatgttggtcaggctggtctcgaactcccaacctcaggtaatccgtccacctcagccttctaaagtgctggtattacaggtgtgagccaccgtgcccggcccttttttttttttttttttttttgaaacagagtctcactctgttgcccaggctggagtgcagtgatgccatctcggctcacgcaacctctgcctcctgggttcaagcaatcctcctgcctcagcctcctgagtagctggaactataggaatgaaacaccatgcccagctaattttttttttattatttgtagagatggggtctcactatgttgcccaggatggtttcaaactccagggctcaagtgattctcccaccacggcctcccaaagtgctgggattataggcatgagccacaacgcctggccagagggataaaatcttatctgccaaaacctataatacataatgtcaaaattgatgaataccaggaaaaaaaagcttaaaaagttgaaaatggtaacctctgggcagagtagctgctgggtttttaaaaaatatgtaggccaggtgcggtggctcacacctgaaatcccaacactttgggaggccgaggcgggtggaagatcacttaaggtcaggagtttgagactagtctggtcaacgtggtgaaaccctgtctctactaaaaatacaaaaattagctgggtgtggtggcgggcacctgtaatcccagctactagggaggctgaggcaggagaattgcttaaacccaggaggcagaggttgcagtgagctgagatcgtgccattgcactccagcctgggcgacaagagcaaaactccatctcaaaaaacaaaaaataaataaaaataaataaatatatatacatatattatatacctttgatgcaccaaatatttatcacacaagaaaatatgacttcttaagttatacataattttctaacaaaatatagcagttgctttttaaaatactagataaaaaggggctattgattaaatgaagttcctgagatggtaggaaggtgtataatccaggacaggaagtgctgatcatctggggctggagataaagaggtgaggtgggtgtggtaatagatactcctgcaggtattgcaggttctaggggcagaaagttgaggaaatccatgcctgatgaaataggttgtaatgtcacctgctgggagcaaagggagtctaggcgttgagcagcttgaagacagtgtgaaggaacatacacatggagcaggatgttactgtggaaatttcaggctgggtatggtggctcacacctgtaatcccagtactttgggaagccaaggcatgaggatcacttgaaaccaggagttcaagaccagcctgggcatcatagtgagatcctgtctcacaaacatttttaaaaattacccaggcatagtggtgcacacctgtagtcctagctacccaggaggttgaggtgagaggatcacttaagtccaagagttcgaggctgcagtgagccatgatcgcaccactgcacttcagcctgggtgagatagcaaggtcctgtctctaaaaaaaacaaaaaagaaaaatcagctgagtcaccaaagtggtagatattagaagccaaagtagtgagttgtgcaacagaccattatgcagaaatttctttttttttttttctttttttttgatacacagtccactctgtcacccaggctggagtacagtggcgcgatctcagctcactgcaacctccacccccagaatcaagccattcccctgcctcagccttcccagtagctaggattacaggtatgtgccaccatgccctggctaatttttgtatttttagtagaaacagggtttcaccatgttggccaggctggtctccaactcctgacctcaagtgattcacccgcctcggccttccaaagtgctgcgattacaggcatgagccatagtgtgtggcctacccttccttcttataccaagaatataaaagaattggagacagaggcagaaagaaaattttgggagatagctgtgttgtgaatcccactgcccttcaggggaaggggtgaaggagcttcactgcaaggcaaaggagaaggctacgaggggcccactctgaaagcttaagatgtgtcccctgcagactagaatctaaaggtcagaagttaggctgggcaactgctgagggatgaggccaagcaaaggaggctgattgagtaagaacaagcccacatgccagaattggccacggcaaagcatgtgtgagtgcttcccatggatgaaagggaggtcatgcctgagagggagctggaatggggttgtagcgacttagacctggagcacagatgtgtccttagcagaatgacactggaggtgaccaccaggtacctaggagctgtagaaggaacaggtagccagagtggagatgcatagacctagatcaaagttattgcaggtgggggctctcccaagaaccattaagtgcccacaaaactgacagctgtgaagagttgccagatacagagtagtgtgaagccatctaaccacaggaccagtcaagtaagaaattttctgccctcttcctctcttgttccttccactcctggaagggtcagaaaccagtgaaatagtgggagaaagaaaaaaggttcatgctgggcatggtggctcacgcctgtaatcccagcactttgggaggccgaggcagatggatcacgaagtcaggagattgagaccacggtgaaaccccgtctctactaaaaatacaaaaaattagccaggcgtggtggcaggcgcctgtagtcccagctactcgggaggctgaggcaggagaatggcgtgaacccggaagacggagatgcagtgagccgaaattagcaccactgcactccagcctgggcgacagagcgagactctgtctcaaaaaaaaaaaaaaaaaaaaaaaaagaaagaaagaaagaaaaaagggttcactttccctgggtccctgggtccaggatttctgcctaaagcatgtcctgtctgggattacaaatagatgacttacttttgaatggggattgaagttttggttgctaccaccatacactgaacatacgcatttaaaattgagattgtcttttttgtgatttaaagtaactatctaggcccagttgaggtgactcaggcctataatcccagcactctgggaggccaaggcaggcagatcacctgaggccaggaatttgagaccaacctggccaacatggcgaaaccccatctctaccaaaaaatacaaaaattagccaggcgtggtggtgggtgcctgtaatcccagctaactggggggctgaggcacaagaatcactcaaatccgggaggtggaggttgcagtgagccaagatcacaccactgcactccagcctgggtgatagaatgaggctcggtctcaaaaaaataaaataaaataggccgggtgtggtggctcacacctgtaatcccagcactttgggaggctgaggtgggcggatcacctgaggtcaggagtttgaaaccagcctggccaacatggtgaaaccccatctctactaaaaatacaaaaattagccaggcgtagtggcggacacctgtagtcccagctacttgggaggctgaggcaggagaatcgcttgaacccaggaggcagaggttgcagtgagctgagatcacgccattgtgctccagcctgggtgacagagcaagaccgtctcaaataataataataaaaaaataaaaataaaataaaagtaaccatctaactttttattaccaacaagtgtcaagaaaagccatgagaccattcaaatttacatctaaggcaaagaagagaaactagccccaccagaaaaagaaataaataaaggggccgaggagatgagaataaagttgctttcctagctactctgttgttcacacgagtcaagaggaagagggatgcctataagcaacatgataaaaaatacagacttttgaaacaaagagaattgagtttgtaatgtggctctgccacttcctagcttatgtggcctcaggttgataacataagttctctgagtgttttctgcattagaaaatggagctagttaggcatatctcccagggttatttgggagcactaaactagataacatttggaaaaagacttaaaaacatattggttttcttcctttctcctctttgttataggatgctgtggttggctggtcagcctgggtaagccagggaagatttcctgcaggtggtgactctttacactgtcttctccaaaggacaaaagagaagcagattggcagaggcggatcatgggatgctccagacaaaagcaagaggagactagggttggcagataaaacgcaggatacatacccaattaaagctgagtttcagataaacaacaaatattttttgagtagaaaaaaatgtttgagatctactgatactgaaaaaaaaagccattatttacctgatattcacatttaatttagtgtcctatatttttacttgctcagtctagcaaccctgaatgatacagagttggactgcttggctacagtggagagagtgggctgagtgtcacacaataggacaagtcccatccttgtacctacttttctagctgtttcataggggttctagttgagaggaagtgactaaatctgcagtattgagaaattcacttagactgagttgaattgagatgctctgagtcatttacacacagagcaagcaggctgtggaggctgggcccttaggacaacagctctcccagcaggttggcatccttttatgcctggaagcagaggaatggatgacctcagaaagggttcagaaagaaatggaggcaagttctcccccagtgcctgccctgctgccttttcaggcccagccaggccctggctcccctgcctgtttgaagaggtagaaaggcacagggcaaaaaaacaagatcctgcagcagcagcccctcatgggggaggtgggtgcaggctgaacgctgactgggccctttgctttgtacccatcctgcttattcccacacaacaaaagcgctgctcagccgcctggccagctccattgtgcacttaccacaaagtgctgagtccaagggcttccctggccccatgacctcactccctctcccccggcctagaggcaaggccagggagtcaaagccatccacaaaattccactgagcatctatgctgcttggcgtgtagccctggtgtccagaagcccaaggttcgaaatgccctggttacatatggggagctgtcatggtcctcttaatgtcagatatcacctctaaatctaacagtgcaccccgctggacagccagttgtctcattcagttgtgcaatgggtgtgcaggctgagaacacagtttgcaacctgtgtccccaaaagatccatgccctctagaaaactagactgacagaatacgctgctaaaatttaataaagaaaaatatcggaaaacaagaaaaatggagtgaattttccaaattcaaaggaaacattttttatctgaattttttttctaaaatctgtgctacttgctcccacttgtctctatgagaatttagcaaaagatggtatctgacttggcacagtcagtaatgcaattaccatgtggtgatgagttctgagtacctagcattgctctaaatccctttatttcccttcatctgatagcagtggttaaggtagatattatcaccctattttgtgccaggaagaaagaagatgggctttgcagtcagatagacatatactgaagtccctgctaggttccctggcccagaacttccctggcctctcagaacctcagttagctcatctgtaaaatgggtattattatctacttcacggcattgtggtaaggattacaaagacactgtctggttttgcagtcaatgctcagtaagctgtagttattattaataaggatgaacaggagagacccatactcagcctgggagaagggattccaagctggttgctcccttcattaccactccttgagtggctctgctttaactttcctggaatgagatggggctgggggctgccgcaagggaagcagcagtgccagacaatgtcagagggggaatccgccagaactctgttaaaaactatattgagttgacatttggaaggcttggtggtcagtactggagagctgagaatcctcaatctttcaggacttaaggtgattgagaaaagtggattgaggccagatgaggacttatgactccaggaatgtatgatggatatttgtaaattgttctcacaataaccctgattcccacccgaccaccactatagttctgtgcatgtgtgtttgggcttttcaatcaaacataaaagcctcgcttctctgcaaaaattaaaaattagctaagttgatctccatgtactagcaattcagtaggatgtaaagcccccatattacgatgctgagggtgtgtgaagcccaagcaggccagttgtggctggggtgagaaggccaaactcagctgggtgctcctagcaataaggactatgccaccagaatcacaaaacccagtcattcattcattcattcattcattcattcggaatatacttattgagctagaaggtatgcttagagccgaagacgtaacaatgacccaggcaggctgcagtggctcacacttgtaatcccagcactttgagaagctgaggccagtgaatcccttgagtccaggagttcgagacctgcctgggcaacatggcaaaactctgtctctacaaacaaatacaaaaattagctgggcatgatggcgcacacttaccatctcagctacctgagaggctgagttgggaggatcgcttgagcccggaaggtggaggttgcagtgagccatgatcgtgccactgcactccagcctgggcaacagaatgagaccctgtcttaataaaaaaaaaaaagagaaagaaacaaccaaaaaaaaaaaaaacctcagtgaactagacagatgaggctcctgcccttatagagcatggaggctagtggaagaattagataggtaaacaatgttttattttttaaaatcacttagtcttaatagaaaatatgttcccaatgttcaaaatttaaagattacagaaaaatatactatgaaaagtcttgtcctgtatctgaggcccaagtgcctcagtttcccccaacatttggaaaccagtacttctagttcctaaagcaatttctgcagcatgatcaatgtgatcttgtgtaattggaaaagcacaggatgacatgaggacacactgtgagggcctaagccagcctaagagtggatgattgaaaaaatgactaaatgagtgtttcccaaagaccctaattctgaagaaaggaaggaggaagagaagggaaaggaaagaagaatcaccaaccatagacagctagtgctttaagcccttgcacagccaccaggtggccagagcatgctatgataccaaaagcaactctgtcccctgccagacatccgtccagacatcacgagttaatcaaggcatcagaaacatccttggggcgatgtgccatgcttagcatcagatttatatgtctaacagcaagtttgtccaaccggcagcctgcaggtggtatgtggcccaggacagttttgaatgcatcccaacacaaattaataaactttcttaaaacattatgagatttgttttgtaatttttttttagctcatcagttatcattagtgttagtatattttatgtgtgggccaagataattattcttctaatgtgccccagggaagccaaaacattggaaacccctggtctggaacgttctacccaaatctgcaaatactcgaatacataccagacctcaccccctgatttttggttctgaagaaaaggggccactgatgaaacttgagtcggggactggagagattgcagaggaattgagagaactttctttttctctccaagctgctatgaaattttcttttttctttttttttttttttctgagatggagtctcgctctgtcccccaggctggagtgcagtggtacaatctcggctcactgcaagctccgcctcccgggttcacgccattctcctgcctcagcctcccaagtagctgggactacaggcgccgcccgccaccacgcccggctaattttttgtatttttagtagagatggggtttcaccgtgttagccaggatggtttcgatctcctgaccttgtgatccgcccgcctcagcctcctaaagtgctgggattacaggcgtgagccaccgtgcccagcgaaattttcaatagtatctttcattggaaagagagtagggtaaggagtcataagcctacaatgtatcaggcagatattctatttttgaggttgagagagtctgagtgacttgcttcaaatctcccagccaggaaactgggatttgaacccacatctgcctggctcaaagccttccacatccattgcagcctcttgcttctcacaatatctgtgatgcttgcagaacacatcttccccttcagggcccctgcggaggcccacgattcccctaccttaccttcatcaagtgtcctgaagtttctgggagaagtcattttacactttaaggtactatacgcatagtaacttgggcctgtgagatttccaaagacctaaaacaattcagtaaaacgtcaaaattggccgggcacagtggctcacgcctgtaatctcagcactttgggaggccgaggcaggcagatcacttgaggtcaggagttcaagaccagcctggccaacatggtgaaaccctatctctactaaaaatacaaaaaaattagccgggcatggtggcaggtgtctgtaatcccagctactcaggagactgaggcaggagaatcacctgaacctggggggcagaggttgcagtgaggcaagatcgcaccactgcactccagcctaagcaacagagcgacactctgtctcaaaaagaaaaaaaaaattggttttgaaggtgtgggtggcaggaattctcgcccctggcctgggtgagctagaggggagaagcaaggacatctaggtccctatcaccgcttgcctagacaacttcacaggaaggcccccgggaatctgagatggagcaggtgaaccctttacatctagatggtgagtccaaaggaggtattcagaaggttgccttcttccccttcctactgctgcccaacgatgacccgcaggctgaaagagccctttcctcctggaactgatgtgggacctggcctgtttgggagcagaatggtgaaaggaattaacatggaagacaaagggacaggcagccaagatcatttgaggaggaaaaattgcttcatttctaggctccttccccttttgaaacagataagttacatccattatatgctcagtgtttatattcagaactgcagttctagccaggggggtctctttcctctcctggaattttttgggccatttatgcattactcctgagggagggccagtgcagggcagtgactttggtgttggttagaactggattcgagtcttggctctgccattataaatactgtgaccttaggcaagtcacctgattgttctcttagtttcttaatctggaaaatggaggtgaaaatagcactgttgtggtggctgtgaaaaagtatttctttcttttgttgtggaaaagtatttaattcaaactttttaagtaaagcatttagcacatgtctaatatataggaattattcaataaatggtttaattcttttttaaaaaacccaaaagttatagctccaaaatttttaaagaaaattgcaaaattaaaaggaatatttaataaaatagctacagagagacacatgtctgctagtcaactataattgaagtcaacccttacatagttatatataaatacagcataataaagattcccaagaatacaatgaaccattttttctcatattgagttcagaattacaataattctttcacatttttaaacaacaagaaatgcacatctgtatggaagtgaggtgcattttgatgtgtttgatatgacatggggtctcccagggtcttaaggtcttaggaagatcccaaggtggtgtgaggaacctggagaaggacaagagacaagtactcatggcagagacttctgtcctcaccccctagctgctctgagagattaagaaagccaaggcctgcagcagccagccatgcccacaacagaggggcctctctggatttctgtatccctggtttaaacaaaggccccagcaagctgagccaccaaagctctggggatcatgaggaacaaaggcagagggagagcagagtgctgacagggccagaggccagaggccgcagggctataaagaggagggccacagagcaagtggtaccagatggagacccaggctgagcagcaggagctgggtgagtaaggccctcagggtgcccttgcccttcctctccttgccctgcagagacatgcccaggagagggcccagttctcctgcctagtgtgtagagccttctagggtggctggagaagagtggggaactctggcggaagacagccttctcttgtcaccccaagaggagtcacttatatagcaataaccactgccctagcaactaaggctgggggatgggcatgggcccccaagaaacgagcagggagaaggtatgggagcaggacctgggaaatgttgcttattcagagattcagaatggaaaaatatattacagagttgacatgcatcattcctgggcccaataccagccaggaggagggccatgaatatctgtcctaagaaacctaatacacacctgcctgtcttccttcttcccttcctcccccacttttccttcctctttcttgctctgtccttccttttttaaaactcgtcctaccatcttcactgtctacctaacctctttgagcctcagtatcctcatctgtaaaatggggataatgataattcttaattcatagtctgtatgtgaagattaaatgcatgaatgcatgtaaagcatttaaaacagggccggacatgtagatagccatttttgagtgtaagtattataactcttttcttcttcactttccttcaataagtctttttcaatgtccccctgatccctcatctccacatgtgctcagcacgatgctataccaatcccctagaagaccgaggccttgccattgaggtgctcaccaggacatccaaccagaacacagattggtactgtgatgagtgctataaatcaagaaagcaagcaagtggctgtgggctggagaaggcaggaaagcctctgagaaggcaaggtcaaggctgggtaggatctaggagatagaaaagcagaaaggaatggccaggcgccgtggctcatgcctgtaatcgcagcactttgggaggccaaggcgggcagatcacctgaggtcgggagttcaagaccagcctgaccaacagggagaaaccccgtctctactaaaaatacaaaattagccgggcgtggtggcacatgcctgtaatcccagctactagggaggctgagacaggagaatcgcttgaacctgggaggcggaggttgcggtgagccgagattgcgccattgcactccagcctgggcaacaagagtgaaactctatctcaaaaaaaaaaaaagaaaaagaaaagcagaaagaggccagataaggatgagaccgtgaagggttacgagggagtctggggcttgggatcctggcatggctggctgtttggccagtcacatgaggggtctggcctaggtggttgccaaagagtttatattgcagacagaggtaatgctgtcacctgaaagcaagtgagaggacagggtctcagtgctttacctgcattattgtttctgatccttgttttttttcttttttttttttttgagatggagtctcactctgttgcccaagctggagtgcagtggcacgatctcagctcactgcaacctctgcctcccgggttcaagcgattctcctgcctcagcctcccgagtagctgggactacaggcgtgtgccatcatacccggctaatttttgtatttttagtagagacggggtttcaccacgttggccaggctggtctcaaactcccgacctcaggtgatccgcccgctttggcctcccaaagtgctgggattacaggcgtgaaccaccgtgcccggcctattatttctgatccttacaataactgcatgtcgaagctttaccaatggaaaaactgaggctcaggctgggcgcggtggatcacttgaggtcaggagtttgggaccagcctggccaacatggtgaaacccccatctctactaaaaatacaaaaactagctggacatagtggtgcatgcctgtagtcccagctacatgggaggctgaggcggaaggatcacttgagcccaggaggcagaggttgcagtgaagtgagattgtgccactgcactccagcctggatgacagagaaagaccctgtctcaaaatagcaacaacaacaacaacaaaccccgaggcacagctagtgagcagcagagccagaatttcaaccaaagtctgtcttgcagacttcaagtctcctttacctttcaaggcattccctcacctccccctcctcccaagaggccacatcattcgtgtgtgctctgtcttccagaaacccttccaaccaccaagatggctcagaccaaccctacgccggggtccctggggccatggaaggtaagcccacccccatcacatccaacagggcaggggtgacatgctgcacagagcaggccccaggcctgtgctcgtccataaggcagtgactgaccagaaaaaccccagtttgtaggggaaaggtccacacaagctccagtgctgtcgaaggaaggatctctcaggatgtcccactggacaaaggaaggatgactgtggatgccattgatgggtgggagatgatacctagtttcctaactcctctctcctccccactaaagtcatcttaaaatacagcagcccagcaacagttatgtccatggagaaaatgagggcccataaagatatttactactagatcccaaataaattacaggactcagcctcccatcctgaggttggctttaaccattggccgaagtggctgatcctcaggcctctcactggcctctctccaacactccccactctcctcattgggtcaactctgaggccagctcacagctttgcgagtggtcctctggccaggtccacgagccaggttttagttcaatgtacaaaaagggttgaccataactctcctttacactctaggtttctatagggggtatggctggagaagctaagaatctataaggagctcctgggactcccagaatcctggcctctgggccatgcttatgaaggaactgtggtggaatgggagcccataagtccttggcctgtccattggtctagatattatccctggcagaccatttctatcataaaccaatcctccctccacctcatccctactctgggcaaatgaacaccaaccagtggcattaattcaaaccccttcctgccctgtctacactggaagagacctcatcaggcatcccaggctacagctggtaacagaaagcacagagtcagactgaagttaagctgttgacctggacctctgtttttcctgatgttctagctctcttgcgccattcaatctcatttcagataaccatctatgatcaggagaactttcagggcaagaggatggagttcaccagctcctgtccaaatgtctctgagcgcagttttgataatgtccggtccctgaaggtggaaagtggcgcgtgagtatggacttccgcagaaccgcagccccttatttcaggtcccttcagacaggggaccatagagtggggataggggaagaaggatgttcccctaggctctagtcatttctcggagacaggcctcgaaagaaatcactacatgcataatttagtaagccaaagctagaaggaaggaacatgaggttcttagtggcttggtactagatttcaggggctggataaagaaatacatacaatggggtgggacagtggcagtaatcaaaattttgcttctggagctcacaggctgctacctagggtgccctcagaacagccacaagacccttgagtttttcttgcctgcagaaaattggtagagaagaaagtgtcaagtggctgcctcttcatggctaactctcctcctgcatatcccagagcagacactgttagctaatttctttatgaaaaaaaaaaccttaaccccacgactccagagacatattagctcctgattcatctttcaggcagtttcttgttgatggttaatcttggtgagggagaccctctcatttttgtcctctgactcttggcagagtagttgaggcctttatcattagcctgaaaatacctaaggaaaagactcacccttgactaggcagaattggccttgcatgtggataggcttccacaagttgcttgccaccaaaattaagctcttcagtcctttaaaagatgtaacactttaaggtgtcatcactaactgagacccagttgtgaaaaactgagctgagtgtttcaagttttaagtacaggtatggggcactaggagaaagaactcgcaagtcacaggaagaaaaaagactagtaatccatcagttgcttgttcatccctgtgctttcttaagaagaagccaacaggtttggcttgagccaaagcaatagtccaggggtgtctaatctttttggcttccctaggccacactgaaagaattgtcttgggccacatataaaataccataacgatagctgatgacctaacaacaacaaaaacaactcataatgttttgaggaagtttacaaatttgtgttgggctgcgttcaaagctgtcctgagctgcatgcagcccttgggcaacaggttggacaagcttgcaacagtcactagatcctgaaacaggtagagaataggtgatttggagaaaaagaaaaaaaaattttttttttttttgaggcaaggtgtcactctgttgcccaggctggagtgcagtggcacaatcatggctcactgcagcctccacctccaaggctcaaccctcagccccctgaatagctgggactgccagtagtgggtcaccacgcctggctaatttttgagttttgtagacggggtttcgccatgtttcccaggctggtctccaactcatgggctcaagcgatctgcttgccttggcctcctgaagcgttggaactacaggcgtgagacaccacacccagccaggaaatataattttagattggctttgctaatacacttcactcagaccagtgaagtagatagaccttttcagtgataacccccaaacaaatattacattcactaacctgcttagtatacctgtcaactcattcctcaactcttgtgacaaattactttgtacagctctactgggattggcttgatattttaccccactattgacttatctaaaacgaaagatgccttctccccaaggccatataggctttgaacaccatgaacaaacactacatgtctttggcagctggattggttatgagcataccagcttctgtgggcaacagtttatcctggagagaggagaataccctcgctgggatgcctggagtgggagtaatgcctaccacattgagcgtctcatgtccttccgccccatctgttcagctgtgagtctctgaaatttccacttccgtgcatatgagggatgggacaagagggtgtggacagactgacgttcatgctatttatcatcagttatgctgaatgtggcaggaaaaaagacaaaagtaaaaaaagagaaaacatcactttcttctctaagcctgctatttgatttttctccaccaggtggtacttcccttaagctaaaactaagggtcttacaagtggcaataagtggatactcaagagcccagtaaacttgtgaaacactagtaaatgagtgaaagtgcttaccctgcagcaaaaagtaaatccttggccagttaaatttcaatctgtgtaacatttttactgcagaaacaggaaaatgctgaagtaacctttcagtaagtgggaatgactgacgaaataggcaagtcttccagtatcgatctacactgattgataataatcttcttgttctgaacacttaagtattactcaataatgcatcaggctgggatgtttctggtctttggaaacagttcaagcagaaagcagaatgaccttaaggggtgtgttgaaaatgatccctgtattaggagttaggttgggctagaacctttccaaatattcagtctatgtgagagtttctcgtgattttggttaataatctcatcttggttcaaagtcttgccaaaattcaactggtggagaagttaacctaaatagttctaatccaaataaatagttgcctgtctggaaattatttcaatctcacttttaaaaacatttcatttgcccaccctaaggtataactgacatacagtaaaatgcacagaccctaagtgaatattctcatgagtttttgaaaaatatatagatccatgtaaccaacaccctaaccatataaagaacattccatcatagttccctggtgtccctttccactcaattgctcccctaccactttctattaccaaacagttttgtccatttttgaagttcatacaggttagtctctgtctttttaatgcttgtgtagtattcatgtcccctactggacatacaggttatatccaacaacacacatacacacgcaagcgcacacatacatatttgggcttactttttgtaataatctgtgagatcttttttcacattagtgaatattaatcccttggttggctgcattttgttagtactttttctcactgtcaaatcctcttcattgttccaaaatagtatatcagttatttgtacattcaaaatgttatggtatttaaattggaataaacaaaattatgggtaacttttttctcacaaatctgttgccttaatctttttaaattatcatgtgcttccttgtataatccaaaagtgtttcaattttgaaaaacatgaagaatgatagccatagcactagtactaaacattttaaaacaatttctgaattacagaatcataaggagtctaagatgaccatctttgagaaggaaaactttattggacgccagtgggagatctctgacgactacccctccttgcaagccatgggctggttcaacaacgaagtcggctccatgaagatacaaagtggggcgtaagtacaaaaacagggttggaatatacttcaaagtaactcctgaggttgcatcaatagttatgttttaatcagatttcatacgtatcggtatagatgtcacattctagttctacataattttgaatctcaatttctttataccaactaccactttaggttgcagatttatctcccccagacatgcctctatggaagaatttacgttgactacttatacctgttttgatgattaaggctaattaactagctatagccatattatgcttacaaatagtgcctgacacatttaggatggctattttttctaagcctaaaagcatctcataccattgtgttgagtaaagaggctcaggttttggggtattaaccagattcctaattagttttaataatgaaatgtactttgaatttcctagctgggtttgctaccaatatcctggatatcgtgggtatcagtatatcttggaatgtgaccatcatggaggagactataaacattggagagagtggggctctcatgcccagacttcgcagatccaatcgattcgccgaatccaacagtagctgattaaaagctccaagtacgataattcctcaagcatgagaccttgctaagcactctagaataagttttatgttctgctcacagacattgctttcaaatgttagctgctgaaatccacaataaacgtcatttaaaaaaaaaaaactttgtagactgaattaactaccatgcttcacataaatcacacctaagtggatgagaattttttttttttttttagttattttgctcttgttgctcaggctggagtgtaatggcgctatcttggttcaccacaaccttcgcctcccgggttcaagtgattctctgcctcagcctcccgagtagctgggattacaggcatgcaccaccacacctggctaattttgtatttttagtagagacggggtttctccatgttggtcaggctggtctcgaactcccgaccttaggtgatctgcccgcctcggcctcccgaagtgcgggattaccggcgtgagccaccacgcccggcctgtggatgagaatttttgttgttgttgagacagggtctcactgtcacccaggctgaagtgcagtggtgcgatctggcttactgcagcgtcattctcctgggctcaagtgatcctgcctcagcctcctgagtagttgggactacaggtgcctgccactatgcctggctaatttttgtactttttgtagagatgaggtctcactatgttgcccaggctggtctcgaattcttgggctcaagtgatccacccactgtggcttcccaaagtgctgggattacaggtgttgagccactgcgcctgtctggatgagaattttttaagtcaagcttccataaaactccacattctcttttgtgtccttgcaagtcactcaccaggccaaggacaattattccttatctcaaagaacaataaagcatatgacctaaatgttatcaatctctatagcgactgacacttttggtaaatgtttttatgtcctttcctcccgtctcctgctctttctaataatgttgaagttggcattgattttcctttcaccttgtgacaaatcagtactaaagaaacaggaagtttctccagtgtgtactgccacatatttcaacataaagttatgaataaatccagaatcttggcaacttaacattctagttgctcaactgcttagctcaattttgatttatttcaattggaagggcataaggcttaatgtcctgcaaaaaggcaggatagctctggatttttcaataagcaagctaattctaagcactgtaaaaacctgtatgattaaaaaatttttttaaaatcataggaccatagtatactgaagacttaaattcttcacatatttgaccctttggaaaaaaatcattatcaatgtcacaaacttagttttcggtttgtttttctttttactttttatcagctgaatttaagattagtcagtaaagactttttaaaaaattaaagcacacaaaagataacaaacacctcagaaactttaaaattttttattcaacaatgtacacttattgtctctcaatttgatctacaaatttctcaagttttttttctgataaaataagtaaatctgggtatggttgtagagtgtttgtaatttatatttttaaaacactgaacatgatgaagacatcaataaaggaagatcatcacgtaaatgacacttcctcagaatccatgacatcagaaacagctatagcaaatacctaagcatttagcaaaagggaaaatttctggtgactgttcttatatgtagaaaagacctatatttttgactgggcaaaacaaacattgaaacttttttttgagcggggggaacatcctttaacataactgtactccacttattatccattcccccagattaagaggtaactcagctccttagtgcctctgcacgagacagagaaattacttcactcctccagtaggttctaagactgaacataagtgaactactgacagatgcggaagaggaaccatagccatctaaaatgatgcttgctacactcctgcatttctgccttttaaggccatgcaattaatatgggtcaccttttaagtcttaactggataacttagtttttaactgccactatcaatgaagatacatatagaagggttttgctgtgtcctcaaaggcaacaatatacttgatgaagaagtaaccctcttctgtatattgaaaaagctataaaatggaaatatttattttttatgtaggagcatggggaaaatgctatcagtaatatcttctacttaaacatattagcctctcctacaaaggtcctgaaccaattaaaaaaaaaaaaactttaaaaaagatgatttgacaaaacctgggtagtagtacatctacacattataagtacacatacacaaagtaaagctatttagtacatacagattgcagcacttgaaccaaatgtacccaactcctaaacttgttctaatcagcttgggcaattttttaaaagatacacgttatctttaaaacaaccagtgctttgatcttacaaacaactgaataattctaatctcaagccagtcaattcagtaaaccaaatttatgctaaagcaataaaggtaaaagcctatcctacctttaaaccagctttaagacaaaaaatcgtcaccaagttccatatgacaaaaaagggtctttcagtttgaattactttccatttctatttgatcaaataaaccaaaatattactaaggaagagcatccaatgatttgtaaagctgataaaactgccctgtttcaagaaaagctctttaatagatacaagtcaagctctcgtttaaattgaactttattaaaataggtgccagttttcctctctcctagttccactgatgagctagcccagaactatgtaactttgagccaagtttccaaagatggtaaagctaacaacagcaaagtagtaaggacaaatcggtcacttttggtaatgacacacaaattaaactttcaaaacatgtgcatagctttattcatctacttagatctaaccttttcacggagcttcggcaaaattcgagtgtgcaaaatgcatttctaaaacgtaatgcaagcaaagctttcacatttacactggcaggaaatacagagagaaactaacaagtcacattagggaaaattcagatcttttttttttttaatgacaagaattgcacagtttattattttgagacaattgttgcagacataaatatttaaaattttctaagcaaggtgcttttaacaaaatttttaaagttggaaagagctgataacttggatcatagctcacacagaattccaaattaaagtggactccattatctccctatattttgcaaacaatgctttgtataacacttctttaaaacactaaaagagacagcaagctgaaacttttttcaaagcacacaagaaatgtttacttgaagaaggtgctgaggggagaagggagtgaagaatccttttactatttcccactacaggacagccactaacagactaagaacaaaaaagatacaacaaaaaaagtaaatcacttccccagcttataaaatagttccagtttcgcaagatctgtaactttaaacagagagcaccagttgggcaatagaatgagcatttcatactgcataaaaattagtgaggtggtaagaaccatcgactatctcaggcattactacatggcgtttccaattttttttttttaatatacatgcaaggcacattgatataaaaatagatctctggccaacaaatatattaaataagcaaattaaaattttggctttgcgatattggcaacatcaaaatataaccagatagctttggcccacacatctttctcattcctccacctcatttggtgtttcccacccattattttgggttcaatcaccttcaagtttgggtatgtgcttgagaaatgacttttcttcttgtcaagtagcattcactaaagttttcctttgctaagtaaaaagacaagagaaacagctggagttttgattgatttgatttaaactaaatctgattggttcagggcagcactatttcccctctatatacaaacaaaaaataagtccccagcttacatagacaaatgttttctaaaagatcagcaacaaatcaatgacaccacgtcctttaagccattcttcccaattcctctttctgaggcagagagagggaataatagaaacaaagctaagatttaaactattttcagtagtagaagacatttaaggccaaaaagtgtactattaacagaattcttatattcctaagttattgtccttcataggacaatatcagctaagaattagttacttgtattgattccctcccaaaaagaattttataattcattcactcttgttagtggctgtgctacaggaaaggtatcaaagcaacctatggtatatgtatggtatatagtaatgtaaaaagtgcatcacattcttgattttcagtttctcatagcagcaggattaatctaagacagaaaacagttgtattttcattcttaaaatgcaacaatatctaatgaaatgtattcaagatcatgaaaggatcctcctctatgaaggataaatgaaaacagattaataatagacaaacagggtaaactaaaggcattcattcatatttacatattaaaaccacttttgttaacaccaaatctttacatctagcaaaagaaataagcattttaagaataaagcagacatcactaaagcagtatccattttcagagcctttgattagcacctgaggaaaaaagggtacatggaaagctatgtaatttgccctcaagttaatttgttggtctgaagagtacaacaactttgatatgcactgaaagtaaaactaaattggaaaataaatgtttgtagttagtttaataaggctgtagaaaagagatacttggccgggcacggtggctcacacctgtaattccagcactttgggaggctgaggcgggcagattgcctgaggtcaggagttcgagaccagtctggtcaacatggtgaaaccccgtctctactaagaatacaaattagccaggtgtggtggtgtgcgcccgtaatcccagctacatgggaggctgaggcaggggaattgcttgaaccagggaggtggaggttgcagtgagccaagattgcgccactgtactccagcctgggcaacagacagtccgtctcaaaaaaaaaaaggtgggggggggggggatactgcagtattataaaatggctttagaactctgcacataacaaaattgtatggaaaatagggaagtctgaatcagcaatcccatcacatatgaggacggccattccatagtttctagcccataactgatttaccattcccaataatgcaagagcaacataccaatcatgctgcaatgggtgtttttattatgcagacaaccgaaaattctattcgcactattgctggcatcctttaactactttaagacctttcttgagcggcaaaacagtgtgaaatttaaaactcagtaaagcaatgcttttgagtggagccaatgattcatcactctcccaggtggtcctggttctcacacaggtgatgtatattttaaaagaaacattttaagataccaaaacagaagcccacccttttcaccatgaaagaatcttggtgctctgttgattaattacattagtaaaaataacatcgatattaagaactaatgttaagctatgtgcctctggcaaacctaaagcagctatttatgcttctagtcttttcctctgcctctcccttttaaacaaattatcaaaattttgtggcgggtaaggggacaagagcaaatcctacgttttcctttcaaatccaacagttaagtcatgggtagggttattaagatactgccctatcagactctaccttgactggtgtggcatcaaccaatctgaccataatgaccattatatttgtcccataacataactgttctgcacagttaacatatttatacaagagggatcagctgttgttgaggatgtggcccagcggcataactatactaataatacctggaaattggacttttaatctatttctctgaagagagccttgtaggaatgactccgtccttatttacagtggaattaaaattgagtaaagtccatttccaatagccatttgatacatgacaatttcacactaaatggcttatttaaaaaagttcacagcaattacaaaagataaatcattagatgcctctgatgtggggaagcaacaagcctaacaaccaagtatgatattatcactatgtaatgttttttcaaaattttgtattgtggacaactcccatagttgaggtttgtcatattttccctacaaactgttatttgtaaaaacaatgcagcacttttcctttatgaagtttctgcagattgagtaatgactaggtaagcagatgattaaggaggacaacaaaattctaaaatggagaaactctggccatttatttcaaagaaaaaaaaatctgtcattaaattcctagttattggctatcccctcctagaaagtagaggaggaagggctggctaccacagacgctgtaaatacactttatgtgaaggttcattactaaggaggttagaagaaaggctatgtaattaacttcagttcagcaaagtgggggtgaataaagagaaagataatacaccctgtgtattttgtgggaaaaggggattattgaggacacctacaagagtggtatgtgacacagaagcctacaataatcaaaacagatttaaaaagaaatcttcacccataattagtatcttcatagctattaaaaaaataggtcataatttcattcttagtgccatttttcaatactacccttttaaggatttaaaccacctgacttttttctgtgtaatgaaaacaaatggcacaaaataaatacaagttcattctctgaatactaatgtcttatacacattcatttactaatttttaatatctccatcttttcctcacacacacatacatacatacataaacacacacacacacacacacccctttttcagtctttataatggagggatgttaaaaatcccctctagactgtatttggtttatgctacagtactaatactctgagttgaaggaaaattctttataccaaacaataacacgttatttaaatgtgctaaattaatcacagctgaagtttgtttagaagcttacacaaaataatcagaaaacagatcaactcttaagatttttttttaataagtgctctgtaaggaattgtgtgaggacctaaggagaaagattgcaacaaatagagttaagtgttaccaaacagcacaaagagatttgtcccaaagtcctgcttgtacctaggcaattaagtctattaacctaatgcccccaaaatactgacagttaatatgatggggcactagggttctcagaaagttaacagacattcctaactacatacctctaaccatataatcaaggaaatttcagtggagaaatcaaagtgaaatgttgcattgtttcatttagaagtgagactctcaaaaacctttggacagacagagaagtgatacattctttttggcttctctgaacactgaggcctgagggatatggaaggaaattagaaaagcaatagctttctaaagatgtttaatcaagtgttgcttctaagttaaaaagcccaattcaggtggggtctgggtttgttttttgttttttccttttcaaatatatactcaattcaacctctgtatgtcacaaacccagaaagtttcttgtgagttgtgagacggaagaactttaaaattccaggcaagcaaaatggacatttaaaaaaggggactagagaggggaatctggccctaaggcgacaagtggttacacaaggcaattgaacacacagcagaactttaaaacctgtaaaacaaactggagccttttttccctttaatcaaccttatatgtctttttttttaactttttgaaaatttttatttaaaaaaacacaaaaacacagacttttttcacttcagttatgtggtatgttgcattttccagtttgttcaatgctttaaagctcaaggatgcctctgctttcaattgtacatgggcctgaagcatcctagcttttggcaagcaggcaggagactcaacaaaaatcaaaataggaacaaggcagactaaatgcagggcacatctgtaaacatattatacatttgaaaattacaatatcagtcaaagtgatacagtttacaggtgaaatgaaactatctggaactggcctaccacaagtttctgaacctggactgatacaataagttattttatatatatatatatatattatgtataaaaaaaagttttgtttacatcaagtggaattggcaatccatgcttatacttttaaaatctaagcagggcagaaatccagactaaaaagatagttactctactctatgttgagtccaacagcttctttcatgaactacttgttttaaaagcctcaaataatcaacaaaacaagaaaacccatccatactacagtcactcaaaactggacatttctaggggtagagccaaagtagttactttctccccaaataccccaggggatccagtctacttttatcagaagactacaactctttatataaatgccctgatattttaacctgtatttgacatacatggatatactaatttctgtgtgtgtgatgtgatgctgtgtcaggccagacaacttgttattatgttactaacatcacccaatctcaattggacccttaatttctgcacacacacacaaaaatttattttagcatgctatacacaagctgcagtgcaacaggatggcaatgtaatgataagacagggctaatgctcttctctgccccaaagaaaatttccagaatttcacattattttccttaaaaacccatcttgctctagtaataaaatatatttattaagatataattagaagctaacaagctcagaagtatagtttgcatgaaaacacaccttctacagtcagggtttattatcttctcactggctaaaaacatgaaaagttttagttttcatggacttttttcttccccttttagattttgctgagaaattaaaagataatttacagaaaggtctaagtttgtcttaaatgtttgatgaaaaacaaggaaaacagcacatttagtgttagtgacggagagcaagtctggagcacctacagttgaaaagcagaatatatttttgctcccagttatacaattacattaaaatatgggcacaggaatatttttccagattgtatatctaagccaattgcttgttctgcaacttttctttaaatgacacgcatagattcttcagttgttaaagtccaatatgtaaccgaagccaagttaactatgtaccatcaactaactattccagaattgtagaacttcaatgccctcccctatccccgccccacaaaaaataaatggaaagaaataaagtatttccccaacaccccagaggccgcttaactcctggcaagacatgcaaatcatattcgctaaaaaaatacaccctgctaacttcaaggcatttatccagcattctcgcagggcttaattaaagtaaaaccaaaaagatcaagggaggagtggggggaaaatgttgaatcattctgggttccccgtgattagtgtatcacttcagtcacagaacaagatacagagatcttttaagtggatttgcctttccagtgggtcatttgttgcccaagttgatgacagcaggaactttagaaccacacttgttaagtctgtattcattaatcacttgcattcacacttaaaaacaaaaactaacagaagaaaaaaaacctattcagtaccggagattaaataaccatgtgtagtctcttgaaataaatttgattccttaagaagtctaattactttcagttgccttttttaaataactatatatatatatatgtatatatatatatttgtatatattatcctgtgattctacttatggttcctctgctgcgttgaagatctaggagcataaaagccttgtgtcccccatgaacgatggctctaatgctgcagaaaggttacgaataggcagtctggtccttcattgatctggactatccatggcttcattgtaagtgattatccttttgggatctagaaaggttaaaaaaataaataaaaataaggtctagaatctcaaaatgcccgtattccaataacaatcccaaataaccatcatttaaactgaccaatttttttatgaaaacaaaacttcaagcccatttcctccttgtaccaacacatgtatgatccagtttctcaacctggaagtagctatttggaattccaatgaattccaagtacagggtcctctagccagtgagggcctcaactcctgcagatcagagatggttgagttcacttaagggttttatgtacttctactgattacaaaagcagtgtatttgaatacagcagccaaagaaaaaagcttgtcaccaataatccaatattaaaagaaacacttggatttttcttttgctgttcccagcaaatgaagtcaaaatttattttaaccagtgtgggaactatctaagtaaaacctgccaccaaaaacttgacgttaaattaattagcaaaactgccaattcagtcctaatcaagactgactcaacttcccacagtaacaccagcctttattctcagcactaacaaaagactatggatctttcagattcaaaacataaaactgttagaatgtgtctggaagaagactccagggttattctaaattcttactatttaagctgcatgctcccctcttctggaggggaactgtttttatttttatttttttattttattttatttttttttttttttgagacggagtctcgctctgtcgcccaggctggagtgcagtggcgcgatctcggctcactgcaagctccgcctcccgggttcacgccattctcctgcctcagcctcccgagtagctgggactacaggcgcccgctaccacgcccggctaattttttgtatttttagtagacacggggtttcaccgtgttagccaggatggtctcgatctcctgacctcgtgatccgcccgcctcggcctcccaaagtgctgggattacaggcgtgagccaccgcgcccggccagggaactgtttttattatatattattttattatatatattatattatatatatacacacacatatataatttctaccttccctaagaactttttcaagtatacatgcttaaaaaaaaaaaaaaaaaaggcaagtcaatacaactggtcacccaatggaaaattttaaaggcctgaaaatagtatcagaaaaactcaagtccacttcagctaagaatcaatctagtttagtccagagataatataataatatcctttctgggactcctagggccacccattggaaatctgccatgaagaacatgctcattcctaagagttaacggccattttacagtaaaaacaggtaggtctactttgcagggtatattttcttttcctttttttcagacgaagtttcgttcttgttgcccaggctggagagcaatggcgtgatctcagctcactgcaacctccatctcttgtgttcaagcgattctcctggctcagcctccctagtagctgggatttacaggcatgtgccaccacgcctggctaactgttttaatagaaatggggtttcaccatgttggccaggctggtcttgaactcctgaacctcaggtgatccacctgcctccgcctcccaaagtgctgggattccaggcgtgagccaccgtgcccagcctgcagggtgtattttctagtctatgtttttttcatttgtttggtaagatacacagaaagtaactccggaagaaagagcaacattgggaaatcaggggaagctacattctagtcctgccactttctagtttacaggaacctcactgggcctcactttcctaatatgtaaaataagagaaatttctacacatttcaagtcctgaaattctaggaatttcacatccatctgaaattcacttacattaattagcaaagtaaatgaggaataggatacaattcaggaattgtatactattcaattcaaaatgaataggatacaattcaggctcctataacagctaatatttttctgaactatgaatttcaattcttaggctgtttgttgtctaccacacaaatacagagaaagaccagccaaaagtggaaatacttattcttgttggtttcctacattaataacatttatggcttgtcttactttcataaccaggaggggaaaaaaatcattcatatcttcatctagtaggtaaataatactttcatctgtttttttcacttacagtattgccccatcctcgccagtcctggtatggtagtgtctttttgttgctgttttcttttttcgtattcactcttaatactatctttttttttggagatggcgtttcgctcttgttgcccaggctggagtgcaatggcacaatctcggctcaccataacctctgcctcctgggttcaagctattctcttgcctcagcctcccaagtagctggaattacaggcgcctgccaccacgcccagctaatttttgtatttttagtagagacagggtctcaccatgttggccaggctggtcttgaactcctgacctcgggtgatccacccgcctcagcctcccaaagtgctaggattacaggcgtgagccaccgtgcccggccctacattttttttttttttttaatttaaaaaatagagacggggtctggctatgctgcccaggctggtcttgaactcctggacttcagcaatcctcccgccttggcctcccacagtgttgggattagaggcatgagccaccctgcccagctgctagtgccttttgattgcagttattaaataactcaaaatacaaagtctatttggtaaattaccacccatctgttaatcccacccaaaaataatgtccagtggttacttattagtgacattttaagtaatctaatcattcttaccttgcttctgcaaattccaaatagattccatttctgcaaagaaaaaaagagaattacatactaagttttggtgagcaaagtctgaagcgatgcttttcattttaaatctaaaaatcctagactgattactgccagactggaggtagggttgaaaatggcaaaattctatgaagttcagataaagcattcatattttcctatagttttcttttttttaagagacagggtcttgctctgttactgcagcctcaaactcccaggctcaagttatcctcccacctcagcctctcaactatagccgcatgccatcacacccagctaatttttctttttttctttggtagagatggagtctgttgcccaggctggtcctcctgcctcaggcgtgagcctggatcctgtaactcttttgtttttttgagactgagtttcgctctgttacccaggctggagtgcagtggcctgatctcggctcactgcaacctccgcctctcgggttccagcgcttctcctgtctcaacctcccgagtagctgggattacaggtgcccgccaccacgcccagctaatttttgtatttttagtagagatggggtttcaccatgttggccaggatggtcttgaactcctgacctcaggtgatccgcccacctcggcctcctaaaatgctgggatcacaggcgcgagccactgtgccagcccggctggctcttataattcttaagtgtcatgtagattattacctgaaatcaaattgccagaataattttgtcttcacaaattgcaaggacatgcaagacacatgctacagataaaataatacttctcataacagctcatcattatttaaaaaacaccaagtatttcttggtaatccactgactcctcaatgaggtgcccaaattttttgaacaaagcattcatcaaatttgactaattaaaattgatgtttaattagtttaaccattcaggcaagtagttctaacctctaaaccacacctcttttttatttttatttatttatttatttttacccccagcatggagtttcactcttgttgcccaggctggagcgcaatggcacgatctcggctcaccgcaacatccccctcccgggttcaagcgattctcctgcctcagcctcccgagtagctgggattacaggcatgcgccaccatgctcagataattttgtatatatatatttttttttagtagagagggggtttctccttgtttgtgaggctggtcttgaactcccaacctcaagtgatccgcccacctcagccccccaaagtgctgggattacaagcatcagccaccacacccagccctaaccacacctcttattttatcctttaaggtcagaatgccaatccacatctattattaatggcacacaatcatttgttctaatttcatccaaaatgtctacaatgtgcttagtttggcatcttaaaataagaaaattatgtacatgtacaaattatagcgacatacacagagaatgcagttaaaaactctacctgtgatacatgaaagcttcagggggctatatatagtcaacagtaattgactattacacaagaaccaaagaattggaccttgaaaggaaatattctatctggagattaacacaaactacttagtaacaaaaatgaactataacaaacattaaggataagtagtcttctgtggtaataaaactatcattttgaaaggacaaaaagattattttaaccctgcttaactattatgtgtaactacattccaatttaacagcaatcaattaaagaaaaggaaaaactgaaactcattaagatgggatacatctagacttgggttacagttaaggcacaacataatccctccgtaggacaaaataagatacagatctaaaattattattttctgattgtatgtgtataaataggggcagggaatggtagaatcacattcctatctctctccctactcccctagcaaaaattaaaactgtaaaaaccaaatttttttttttttttgcacagggggacaaggtcttgctctatagcacaggctggagtacagtggcataatcatggctcactgcagcctcaatctcctgggttcaagcaatcctgcctcagcctcccaggtagctgggaccacagacacatgccatttgtagagatggggtcttgctatgttgctcaggctggtctattgggctcaagcaatccttccacctcagccaccaagtctggcacttttttttttgagtcgcccaggctggagtacagtggcgcgatctcagctcactgcaagctccgcctcccgggttcacgccattctcttgcctcagcttcccgagtaactgggactacaggtgcctgccaccacgcctggctaattttttgtatttttagtagagacggggtttcaccgtgttagccagggtggtctcgaacttctgatcttgtgatccacccggctcggcctcccaaagtgctgggattacaggtgtgagccaccgcgcctggccaagcctggcacttttaaaaaatattttttacagtactctcagctttttgaaaatttgtcagatccatatactgggatcaattaataattcaggatgaataagataattatccagataaaatcccattcaagatattacagtgattaaaccaaatctgggagtttaaaggtgccaattgtccaagcttagttgtatggtatgtccatcaaatctctgcgcagacacctatccaaagaaaggcaggaaaattccctttctcctgagaggtctaaaaaggggagaactataatcaatctaacctggagaaaaaaaaaaaaaaaaagatgacgatcggaaattctagtcacagaaatcacacttatcactccaatataatttcttattccattagtttcaaacaacgaggaacagttaaatgttctttattatcttacgaatttctggatttcagaatggcctattttttaaaagtccaaatacaagccttctcttggttgacctactgcaaaaaaaaaaattgatccaatacaaccaatattttttattttaaagcacagaaatttcatattttgtagcaaataaattcctgaagaattatgtatatagtaataacttgatattcattttgtctactgcaaagataaatctatatttagtcatacgctgaaaaaaaaaattggccaggtatagtggctcacgcctgtaatcccagtactttgggaggccaaagcaggaggatcacttgagggaccagcctgggaaacatagggagaccctgtgtctattattaaaaaataaataagaaaaaagaaagaaaagaaaaagttaatccaacttttcatgttaaccacctataagtaacatttccttttttcttccccactggaaactcaacctatccctgcactttcccctttttttgagaatacacttcagagtcacagtaacaacactactttaaaaacaaagcaaacatacatattttagaataaagaaggcaaaacaactatttgcaaacacccaagttgaagatacttctttactgcagcttaaggttttactcaaatactatacatttaaaaatgatttatgataaaatgttattacccttaaatgtgagctctagagtagtgagtttgatcatgacttctgagggggaaatagggatgtatgatgtacctataaaactagctatgaagcaagccaagcttctagcaaagaaataaatcagcatattcctggtgcggaggggctcacatctgtaatctcagcactttgggaggccgaggcaggtggatcacgaggtaaggagttcgataccagcctggccaacatggtgaaaccccgtctctactaaaaatacaaaaattagtaacgcatggtggtgcacgcctgtaatcccagctactgagcaggctaaggcaggagaatcacttgaaccccgtagacggaggttgcagtgagccgagatcgtgccactgcaccccagcctgggcgaaagagcaagactccgtctcaaaaaaaaaaaaagaaaagtaaagaaagaaatcagcattatcagaaatgctgaactaagaagtgaatgcaatttcccttcctgttacttaatattaattacttctttgactactagcaacttcatttacttgatcaaaatttaaaagtttccctgaaactcaaacaaggttaggatcagaaagggaaaatgaatcaaacagcatttgcatgatgctatgcttaaccttaacaagactaacaagaaatgacatggccgggcgcggtggctctcacctgtaatcccagcactttgtgaggccaaggcaggtggattacctgaggtcaggagttcaagaccagcctgaccaacatggtgaaatcccatctctactaaaaacacaaaaaagttagccaagtgtgggggcgggcaccggtagtcctagctactcaggaggctgagacaggagaatcacttgaacccgggaggcagagattgcagtgagcccagatcacgccactgcactccagcttgggcaacagagtgagactgtcgaaaagagaggggaggggaggggaggggaggggaggggagaagagaagagaagaaaagaaagaaacaaatgacattatcgatagaacacataggaaagggctgacattaccttctgtcctcaaaaaaaggttacaaaaatctcaattcagattttaaatatgaaatgtgttctttttttttttttttttgagacaagagtcttgctctgtcacccaggctggagtgcagtggcgctatctcggctcactgcaagctctgcctccagggttcacgccattctcccgcctcagcctcccgaatagctgagactacaggcgcatgccaccaagcccggctaatttcttgtatttttagtagagacggggtttcaccgtgttagccaggatggtctcgatctcctgaccttgtgatctgcccgccctggcctcccgaagtgctgggattacaggcgtgagccgctgcacctggcccctcgtttgtgtgatttaatgttttgactatccctgagaagcaaaacaagtgaatagtataaagaaggctaaggaaggcaatttgaattatacaaaatcatcatacacatacaagttgagtatccttatctgaaatgtttgggaccagaagtgttttagattttggaatgtttccattatattattggaaaaggagcatttcctttttgaacatcatgtcagtactgaaaaattttggatcttgaagcattttggatcttagattctcagatttgggatggtcaacctcagtaactgattcttttttttttttcttttcttttcttttttttgagagagtcttgctgtcgcccaggctgaagagcagcagtggtgcgatctcagctcactgcaacctccaccacctgggttcaagctatcctgcctcagcctcccaaatagctgggattacaggcacacgccaccaggcccagctaatatatatatatatatatacacacacacacatatatatatataggagacagagtctcactgtcacccaggctggagtgcaatggtgagatctcggctcactgcaacctctgcctcctgggttcaagcgattcttctgcctcagcctcccaagtagctggaactacaggtgcacgtcaccataccagctaatttttgtagttttagtagagatggggtttcaccatactggccaggctggtcttggaactcctgacctcgtgatccacccgcctcggcctcccaaagtgctgggattacaggcgtgagccaccgcgcccagccaatttttgtatttttagtagagacaggttccgccatgttggccaggctagtctcaaactcctgacctcaggtgatccacccaccttggcctcccaaagtgctgggactacaggcgtgagccatcacgcccagccttgatcttttaacactgctctcttctacacacacacacacacacacacacacacagacacacagcacaaaatctaacttgccagttctttttgaagagtgatcacagcatctaattatgcaaatatttattgagaaatgctcacagggccagacctaatagaacgtaagtaaaagtttttgctcttaagatatacccaagtaggcaattagacctaatagaacctaagtaaaagtttttgctcttaagatataccaagtaggcaattttgttaaaattctgtattttaaaccactaccaccacccaatctgaaatttctttacatcaaaacttatatttagctatgccactcaaatgaaaagttaatgttcaatttcctagagcagactttctacataatacctccctatcacaatgcttcctatagcgaaatgtccagttttccacaagttcttaattccaagttgattgaaaaaaaaatactactcaccagctcagggtatgaaaaaaaaatactactcaccagctcagggtatagatgcaaaaccaaagagtctgccctctgtgagcttactctagtaagcaacttcactgggagggtgggttatcagtaagagcatcagcaatgaacaaaggtcggtggtatgtgtgtgctttaacaaggtgtgtttgagcaggggtgaacaaacaattactatccaccatctgtttttgcaaataaagttttaatgagggcctgtggtggttcacacctgtaattgcagcactctgggaggcagaggtgggaggatcacttgagaccagccttagcaagatggtgagaccctatgtctacaaaacatttaaaaactagctgggtgtgctaacagcacatgcctgtagtctcagctactcaggaggctgaagcaagaggattgctcgagtccaagaattcaaggaggcaatgagctataatcatgccactgcactccagcctgggcaataaagtgagacaaccgtgtcttaaaaaacaacaaaaaaagttttaattgaacacagccacatccactgtatatgtaccatctatgactgcttttgagctataatgcagaaccaagtattgagtggttgcaacaaagatgctacggttcacaaagtcactaagaatgagagatttagagaaagaacattattcaggggacagagtaaaaagctacatatgaagtaaagtttgttatttcattatataggtgaagggaagccactgaagaaatctaaggttattgtactaaatagtgatgattcttccaggtaatgaacagaacagatgaagtgacaataatatacagagagtccaataaatgttaagaagagatgaagacagtatgcgagatagaaaagaaaaaaatggagatcttagagaaatggtccatatcatctaatgacaaaaaattgggttaatgctaattcactaagagcaagaaagaaaaagcaggttttggaagagaatgaattcaatttaatatacatagaattgcagcaatgatatggaatatatacggtctgaactcagttttttttttgtttttttgagaaggagtttcactctcattacccaggctggaatgctcgatctcggctcactgcaacctccacctcctggcttcaggcaattctcctgcctcagccccccccaagcagctgggattataggcatatgccatcatacccggctaattttttgtattttttttgtacatacagggtttcaccatgctggccaggctggtctcgaactcctgacctcaggtgatccacctgcctcggcctcccaaagtgctgggattacaggcatgagccaccatacctggcctctgaagaagtcttaagcctagtatataaagtaacagaactggacaagattatccagggaaattgatgtaacatgaaaagggaactcaaggaacaacatttgagaaacagagaatgaccccaggaaggttatagtaaaggtataggatataagagtgggtagagtcaaggaaattcaaactaaggaatttacagaggcaatgttcaactctggtaaatcttaaccaaaggtaagacacttgcaactttctagtcatctctttttctccagcccaatgtcattgccctggctcaagcagtagtatcttttcaacatttatgcagttgccttttaactggcctcctttgccattactcaggcctcattttctgtcttctacaacctggctaaccattcttttcctttaaaaatgtaaatctgacagccgggtgcagtggctcacacctgtaatcccagcactttgggaggccaaggcgggtggatcacttgcggtcaggagttcgaggccagcctgaccaacatggtgaaaccccgtctctactaaaaatacaaaaattagccgggagtggtggtgcgtgcctgtaatcccagctactcaggaggctgaggcaggagaattgcttgaacccaggaggcggaggttgcagtgagccaagattgcgccactgcactccagcctaggtgacagagtaagactccgtctcaaatatatatatatatatatatctgaaagtgaccacattgctcaaaacttttcaatggattctcactgcctacagcaaaagctactagcactgtgaaattgaatttgtgtctcctagcacttgacacaatagctagtacatcaacagattaattagataactaacttaaaggactttaaacttgtaccattcatcttcctttaaacaaactgaatggctggcaatcttcaaacactattatttcctccacctaaagtaatcttactctccaggcacaataaacagactaatgcccacttcttttcggaatcctgactgcccttccctcaccttgcccccatcttaggggttccaattacacttggcacaatcttggctcactgcaacctccacctcccaggttcaagcgattctcctgccttagtctcctgagtagctgggactacaggcacgcgccaccatgcctggctaatttttgtatattgttttaggagagatgggagtttcaccatgttggccagggtggtctctaactcctgacctcaagtgatctgccagccttggcctcccaaagtgctgggattacaggtgtgagccactgtgcccagccaacaatagtaatacatttctttccatatgtttcactattagaccaagtttcttaatgacacaaactctcacctctcatctatttatcactactgcttctcacagggcttggtgcagtaagtagatactgatttgaacaaatactattcataagtcagccaggaagtaataatgtaactgtaaacagtattaggcagacccatttggcattgctcacactcaacttcttctgacctacaaaaacagcaatttcatatagtcaaactgaacagatacagcatttaattattaaatccctcaaggaaaaagactgaagctaaaagggctaaagctaactagaagcttattttttgcatttaaaaatgaataatactattgtctcagctaatagaacattgtttgtttttggagacagtctcgctctgtcgcccagactagagtgcaacagcacaatctcggttcacagcaacctccgcctcccaggttcaacagattctcctgcctaagcctccggagtagctgggactacaggcacgtgccaccatgcccggctcatttttgtatttttagtagagaccgggtttcaccacactggccaggctggtctcgaactcctgacctcaggggatctgcccacctcagcctcctaaaatgctgggatttgcatgtgccaccacgtctgaacctagaacatcttttaaaaattaacatctaaattaaatggctccaccagagatagataacaaatcaacataatgccaaacaaactgactcccacaactgagaacccccaaatcaatttatcactaatcatgccttccaatcccttattaagccattttggatcaaattctgtaaaattcagcaaggatggtgacatggtaaattaaaattctgctttccccctcctaattcagatttgcccattttttggatgattacaggttattgtaccatgttttgctattctgatttcctttttcttaaccagtctgccatacttgtgcctattcttttacaaagaagcttgtcagaaatttctaccaccctttttcagtttgacaatacccagagagaaatatagcatgttttccggccaggtgcggtggcttatggttgtaatcccagcactttgggaggccgaggtgggtggatcacctgaggtcaggagtttgagaccagcctgaccaacatggtgaaacctcagtctctactaaaaatacaaaattagccaagcgtggtgatgcaagcctataatcccagctactcaggaggctgaggcaagagatcgcttgaacccaggaggtagaggtagcagtgagccgagatcgcgccactggactccagcctgggcaacgagagtgaaactcaatcaaaaagggaaagggaaagaaaagaaaaagaaatacagcatgctttcaagtaattctgaattaaggtagttagaagtcaccaccttttcagtagaccccttaatgaactcttttctgaagctacaacaatccaggataagaagaattatccagactactcctaaatagaaactcggaactcaagttgtttttgttatttttctcttttctattgctcttattctaatctcatgtactttattattatttttttttgagacagagtctcgctctgtcccccaggctagactgcagtggcgcgatctcggctcactgcaagctccacctcccgggttcacgctattctcctgcctcagcctcccgagtagctgggactacaggtacccgccactgcgcccggctaattttttgtatttttagtagagacggggtttcaccgtgttagccaggatggtctcgatctcctgacctcgtgatctgcccgcctcggcctcccaaagtgctgggattacaggaattgagccaccacgcccggccccccatgtgctttataagggtaaaagttgcttggaatgaaactgctactactatgatagtaatagcttggaatgaaactgctactactatgatagtaataaacaatttctggttttgctactatcattatagtaacagtgtctgctcttcttacagcatagatggttatttccctcacactcaggacttaagctagtgaaatctggaagttaaattttaacttccaaaaattccttacaagtgatctttcaccagtatcaaggtgaatatattattactgtattcataaagcagacatcatgaaacatcaagcagtcagtatgggtactaaacagccagtatgagttctctcactgggagaaaggggaccttatcccatattaggaattatttgttatattcattactatatgtcccacatcattatatcctcataaacaagtaccctttccaaatctagggaatccaaccagggctaaaaccaaggcaaatcttaaaactgtcaaatttgcaggcacacattaataagattattagaaagacagctgtgatgtcaaataggcattcaggaagcaattgcaatgaaatgcagtaaacgtgaaaatacttattcacattgtgtttagaagagaaaatttaatattcagatccttctctgaacaatgtccaaactgtacacctagtccttgtcaattttatggattaatcataatttgtctcttcatatcctgtttcccaaatcttgttatgtaatcttatctgttcccttatgccctttcccaatctaaaagctttttaaaaaattttttttaaaattcagatcatttacatggttgaaaatacaaagcagaagacctttattatacctctgcctgcactattccaagaaactgatcttctagtcaacagaaaaatggcttccagtctacccaaattggtgccatattaatctacctcaacacagatctgtaagtaattgcttaataccaactgttgtatgtttttgagacagggtctcactctgttgcacaaccttgagtgcaacagcacgattatggctcactgcatctttgacctcttgggcttggtgatatcctccatctcagcctccacatgccaccatgcccagctaatgcttcaaatttttttgtagaaatcaggacttgctatgttgcccaggctgatctcaaactcctgagctcaagtgattttcctgcctcacttcaaaaatgctaggattataggcaagagccacagtacccagactatttttattttcattttttgaggtgaagtcttgctgtgtctcctaggctggatagagtgcagtggtgtgatctcagcccactgcaacttccacctcccagattcaagcgattctcccacctcagcctcccaattagcggagactacaggcctgcaccactatgcctggctaatttttgtattttcatagagatggggtttcgtcatgttggccaggttggtctcaaactcctgacctcaggtgatccacccgcctcagcctcccaacgtgctgggattacaagtgtgagccatgtccggccccagcctatttttaaatgaatattccaaaatgtcagcatttcaaatgcttcatatccttcagtgccataacagccatgtaagacagatcaacccagtttaaattggcactgtgaccaaacacacaactcatatcaattattatttccaaagacttggcttcaaatgactttcaaccatttcaaaatcaaaagtttacttcaaaaagttaggatctagtgttcaaagcttttaaagtcaagtcaaagagaggcttgctaagcattctgagataactacttttaagaaggcacagttatatgtcccaggtatgtacactaagagccatcacaagctaagcatggtggctcatgcctgtaatcccaatacttaaggaggctgaagcagaaggatcacttgagggcaggaattccagaccagcccagacaacatgggtggtagcgcaaacctatggtcccagctacacaggaggctgaggcgggaggattccttaagcccaggagttcaagggtgcagtgagctaggatcataccactgcattccagcctgagtcacagggtgagaccctgtctcttaaaaaagagccatcacagccaggtgtggtggctcatgcctgtaatcccagcactttcggaggcggaggtgggcggagaacttgaggtcaagagttcaagaccagtctggccaacatggcgaaaccccgtctctactaaaaatacaaaaaaattagccgggcacggtggtacatgcctgtaatcccagttactcgggaggctgaggcagaatcgcttgaacccaggaggcagaggttgcagcgagccaagatcgcaccattgtactccatcctgggtgacagagtgaggctccgtctccaaaaaaaagaaaggaaaagaaaagttaggacaggcatggtggcccacacctgtaatcctagcactttgggaggctgaggcaggaggatcccttgaggccaggagttcaagaccagcctgggtaaaatacacagacaccgtcactatatgtatatatacatatataaaaaatacaagaattagctgggcagccgggcacggtggctcatgcctgtaatcccagctactagggaggctgaggcaggagaaatcacttgaacctgagaggcggaggttgcagtgagccgagatcacgccactgcacgccagccagggcgacagtgtgagactccatctcaaaaaaataaaaataaaaaaattagctgggcattgcggtgcacacctgtggtcccagctactcaggaggctgaggcaggaggatcacttgagcccaggagctcaaggctacagtgagctatgaccacaccactgtactccagcctcaacaacacagcaacaccctgtctcaaaaaaaaagagaaaagttaatggcataacatattatataaaaagctaaaagaggccaggcatggtggcatacacctgtagtactagctactcaggaggctgaggaaggaggagagcttcagcccagttccaggctgcaatgagctacgatagtgccactgcactccagcctgggtgacaatgagatcctgtctctttaaaaaaaaaaaaaaaaaaaacagctaaaaggaaaatcccacacaaggaattagaatccacacaaatcccgccaccccccaccctttttttttttagaaggagccttgctctgtcgtccaggctggagtgcagtggcacgatctcagctcactgcaacttccacctcccgggttcacgccattctcctgcctcagcctcccaagtagctgggactacaggtgcctgctaccacgcccggctaattttttgtatttttagtagagatggggtttcactgttagccaggatggcctcgatctcctgacctcgtgatccaccctccttggcctcccaaagtgctgggattacaggcgtgagccaccgcacccagcacaaatcccctttttatgctctattgtatctttacttcataccctcaattgtacttaacactcaaatttttaaaaatccatagtacgcttaaggttccaagtaattgcttaatctaaaaacttcctgtattaaaaaaagcccttgccagaagctgccgccatgcacttggacttcccagccgccaaaaccttgagtcaaataaacacctttctttgttgggtgcagtggctcacacccgtaatcccagcactttgggaggccaaggcaggtggctcatgaggtcaggagaccagcctgaccaacacggtaaaaccctgtctctactaaaaatacaaaattagccaggcatggtggcgtgcacctgtaatcccagctactcaggaggctgaggcaggagaatcgcttgaacccagggggcggaggttgcagtgagccaagactgtgacactgcactccagcctgggcaacagagcaagaccccatctcaaaaaaaaaaaaaaccaccaaaaaacaaaataaaaacacctttctttatataagttaaataaatagtgcaccattcttaaagaagtgacataacgcactctcttacccactatttccaaattaagttgctgaagggcttatttttgaagtcaggagaaatgcagagaacttccaattctaagcccaacttcaactactcacttagagattactactgaacatctgaaaactacactaaagcacaaagaaaataatacagatgttcttaaaggatattccagtagcccaactgattattacttcttttagagttaactttaaaaaaaaaaggcttcacttataaaagatctccaaatataattcaagtaaagaaaaatgagtggccaatggactgctaatggaccaatcaacatttggcaggaattcaaagaacttgctactctggaacccaattgaactgagtattatttattgttctagaggggtaaaaattttgatgccaatctgattaatttccaatcatgtccaaatacagaactcaagatgacactttacctacagcaaattttttcattaataccagcaaaactaaatataactgcacccatataggggtattcagcttatataaataccactgatttcatattcagctagcccatggatagggaaaatgcataaagagtaaattcaggttaacattccaatttaaaaatggcctgcaattccacctaatagaaattgtacataagaactattaaccagttacctaatggaacatatcctacacattttgttgttttgttttgagacacggtctcactctgttgcccaggcctgagtgcagtggtgcaaacatagctcactgcagacctggatctcccagggacaagtgatcctccctcctaagcctcccaagtagctgggactacacattgttgcccaggctggtctcaaattcctgagctcaagtgatcctcccacttcggcctcccaaagtgctgggattacagtcatgacccaccacactgggcctcccagaatattttggaggtggtaagagaacacaacacaaccagataccctctcaggctcacacaatgatcgccagtgcaaaatacttcggtaaacattttccagtaatagtctctagagggcagacggcacagaaaacaataccaaaaaacccaactctcctggcagaggttaactaatgtataacacatgtcttaaaaaacgaagcatttatctttttgccctaacattgctaaaaacaaccaactcctgtatttaccttcaaagagcagagctggagaataagtgaaatcaggtaaatgttatctgtgaggattcctaaacttccattaagcaattctactacttccatttttaaggaagtaaaatgatattaaaaggacatctatttattatactcaatgtcttccagcttgcagataaggaaacgtatgcagactaggaaatttgcttagaagtcacaaatcactttgttattcatccctgaggcagtatttcttccagagagaatatggtaattacccaattcccacaatctggtatggtcccctttccctgcaattgtaagtcactgcctaaatgagccactgttaaaatgggaatgtgcactatgtattaagtgtgtacatgcatgcatggagcatacatttctgttagagaaaggaggaagaggtaggaaagatgggaagactgaaacccactgttctcaaaagcaaaaggatataaacatcatcgttaaacctcattatttgctctaaggatttagattacagttatgccatacagcgaatttttctttaagacacaaacaaaccacattctaagaaagtgattaacatgaggcctggcacggtggctcacacctgtaatcccagcactttgggagacccaggtgggtggatcacctgaggtcaggagtttgagaccagcctggccaacacggtgaaacctcatctctactaaaaatataaaaattagccaggcgtggtggtgggcacctgtaatcccagctacgtgggaggctgaggcaggagaatcacttgaacccgggaggcggaggttgcagtgagtcaagattgcgccactgcactccagcctgggtgacaagagtaagactccatctcaaaaaaaaaaaaaaaaaaaaagaaaaaaaagaaaagaaagttattagcgtgaaacttgaaagatacctggttccctttaaacttgggctttagggctatgaaaaggagaatcccaagagcctggtctcaactatgctaatcatacttgacactgtgatttgtctaacttattttccagttacaaactggcatccattactccaagacttatcagtctcctcttcaaaaacagtgcttctactcattttaatcaaattagaactattaaatgagctcactattaaagacgcatatgatataaaaagcaaaggagaggctgggcacggtggctcacacctgtaatcacagcactttgggaagcagaggcgggcggatcacgaggtcagaagtttgagatcagcctggccaacacggggaaacccgtgtctactgaaaatacaaaaattagctgggcgtggtggcgcatggctgtaatcccagctactcgggaggctgaggcaggagaatcacctgaacccaagaggcggaggttgcagtgagccaagatcacaccactgcactccagcctgggtgagagagtgagactctgtctcaaaaacaaataagcaaatgggtgtggtggctcacacctgtaatcccagcactttgggaggccgtgggtggatcacaaggtcaagaggtcaagaccatcctggccaacatggtgaaaccccgtctctactaaaaatacaaaaattagccgggcatggtggtgcgtgcctgtaatctcagctactcaggaggctgaggcaggagaatcacttgaacctgggaggtggaggttgcagtgggccgggattacgccactgcactccagcctggcaagagagtgagactccatctcaaagaaaaaaaacacaaaacaaaacaaaaaagcaaagacaaaaaagccacggaaggagaacatatgttcaataaaattttttttcaagcactcagtcaagagaaaatataacatcaatacctttaagcaagttctcctcacttctgttctttgaaccaggtaggtcaattatgtttgtatttttaaaaatccttttaagttggaaaagtgaacatttcttctaaattttaatcatactagttccaaggaccctgaattagtttgacaccagctgcttatccacattgtcattctcttaaaatactcttaatatgaacaactaattctcttaaaattctcttaatataaacaatatactaaattggccaataaaaatctttgtataggaaacaaatgagttacctttagtgtgatatacaatagcagccctcaggtcaaaagaaccccagctatcattcctttctaggcctctctggtatctctgttctttggcagagcctaacaaagtgttcgtaggagaggccagaggattttgactttctatctcgtagtcctttgagagaaacactaaagcaccttgactactggtgtctgctttctgcaggtcacctatatgactgggttccaaggataaggctccactctcactagtagtcccagattttagaatgctacccagaacttgaggactagtccgtttctccagctcgtaagccttgggaaacacaggatgctcagttcctgagggaattatttcagcaccctgtgaaaccaaagtagcaggatattctccttgaaatgtcacctccatcactttatgctctgatgacttcccagtaacagtctcagggccagcactgggctcatttataaatgataaaccccactgattctggaagatatcccccaggttttgctgatctgtctgagagggcagatccacttgtgctgtgctcaacagcatagtttgcatatttgaaggatagataaaaaggctagtcttaatttgttcaacagctgctgaagttagactcatgtcctggagaactgaatctgtcccagaagagatgggtgttagagtattagcagcagtagttagcagtggctgaccccctggaggataaacatttccatcagtccctgctaaaacaggcccattagaaaagttggcagaagtaacagatttcagcgctgacatagggacctgggataagcgacttgatgattgggtctgagtttccccggtagatgatgaagatgatgaagatgaagttggtgacacagaagagttctgtatagttttgttgaggttttccttaactttgcttgcataacttattttaggaactattttagcactgctattgtccactggaaaaactgggggtggtttaaatagggtccacgagtcctctttggaggcaacagctgaagcatgctttcctttgggccgatcatcaaactttttgctgctcacaccaggtttactatctgagcttttccgaagcatatcacccacagcaggttttcctcgacttgttcctccaggcccagtttcatacttccaaatgggcttcgaaccatctactcgatttcccttttgttcactatagtcaggcttgaaagtttcaagtccctgttttaaggttgggacactggtctcttgttgcattattttgtcctgcactatattaaggttttcacaacccttggcactattgcgcctagctttcctttttttaggagttgtatatccgctctcagatccactaccatcattatctgctcctttacccatataaccattagtaatataaccagaattatttgttaccacaccatttggaattggtatagtatcagacttatctacagactgattctctccagatttattttcataagacttcccattctttttgtccatactgtttttctgaatgaaattcttggttttaattcctgctttcccaaaggtgttggcctttacagtctgcttcaggctagtgtctacaacttgctggttgccattgaggaccctggaaatagggttggtggcttcatcagaactcaggttctttaaagatatttctctttctccagcattaccgtttagttcaccatagcctaggggaggggaaaaaaaggattaaaaaaaaaaatcacaacatgtaaattacactaatacctaacatttaagaactatttactgtatgctagacactatgctatgagctgtagctttatattatttcacatctctatgagaagacacctgtcagccccattttacagactaggaaatgcaacctactgctaagcaaagcaagaggtagaactcagcgaagattcaaaccaaagtctgaggccagagaagacaagacctcttaagcagtatgccaaatacctctcatctaacagaatcaatctacccatcactctcacaaggctgttataaaattttcttttttcaagacggagtctcactctgtcgcccaggctggagtgcagtggcgctatctccgctcactgtaagctccacctcccgggctcacgccattctcctgcctcagcctccagagtagctgggactacaggcgcccaccaccacgctcggctaattctttttgtatttttagtagagacaggatttcaccatgttagccaggatggtctcgatctcctgaccttgtgatccgcccgtctcggcctcccgaagtgctaggattacaggcgtgagccacacgcccggcctaaaattttctttacaattcagagcagagatgccctctgggcaaaaatcaagttttattgaaacagtaattattacaaggaaattaaagacttcatttctacaaaaccataaatagctggtagtcactatcagcagtttccaaggcatctatcagacaaatatctaacacttgtcaactttttctaaagtattcttaaatttcattttgacatttcccagatattggatattgttaatacgtgaaaccaaaatatctacgtaccaatgtttccaacctttataaaacatactttcttcattttacatttagataaaaagactttaagagagatgaagtaaattgcccaagtcaaagtgacagaactggaaatctgaccgccagtctatctgcaatccatggtttcctatcactatgtaatactgccttgactcaaaagatgcaatgagaaaatatttactaacaaaacaacaataaaaagaatccaattttttagtgttatggtattcaggtttaattaaaagtcttcaactgccagtggatcatgtctgtaaacatagcactttgggagggccaaggcaggcagactgctggagttcaagaccagcctgggcaacatggagaaaccctgtctctactacaaatacaaaaattagctgggcgtggggcatgtgcctatactcccagctgggggagctgagggaggaggatagcttgaacccaggaggtcgaggctgcagtgaacatgcactgagatggcacaactgccttctagcttgagtgacaaagtgagaccctctttcaagaagaaaagaaaaaaaaaccttcaactaccataaaaagtcaattctattataggtgattcaaatagttttccactgtaacaaaatggtgctattagttatctacctttttatgaaatgttcataaaagcatcttgaggtcaagtcattagaaacagatatacaggccgggtgcagtggctaatgcctataatcccagcactttgggaggccaaggtgggtggatcatttgaggtcaggagttcaggaccagcctgaccaacatggtgaaaccccgtctctactaaaaatacaaaattggccaggcatggtggtgcacgcctgtaatcccagctacttgggaggctgaggcaggagaatggcttgaatccgggaggcagaggttgcagtgagcccacattgggccactgcaccccagcctgggcaacaagagcaaaattccacttccaaaaaaaagaaaaaagaaagatacacaatagaaggacactccacacacatttaaggcagcaggaagtgaggagtctaataggaatactgccatttttataagtctgagaaccattgttccaaaataaattaatggagaagtctattagattcacaacaggacttactcattctacattagaaaaaaaagtacaaatactaaaactgaacaaataaaggcattttcttctcctgtattaaagtaacccaagaaaacatactcaaggcataatcattcctaaaacagactggcacaaaacttgtaccacgagagaatacatcttataacagttattttttttctttttttgagacagattctcgctctgtggcccaggttgaagtgcagtgatgtgatcccagctcaccacaacctccgcctcccagattctcctgactcagcctccagagtagctgggattacaggcatgcaccacgatgcccagttccgccacgttggcctggctggtttcgaactcctgacctcaagtgatctgcccgcctgggcctcccaaagtgctgggattacaggtgagagccaccacaccggcctcttagatttcttagaactcttaagagttcttagattccacagggttacatttttaaaaattttttggctgctggaaaagctatgatagccaatcaaatcaaatttttggtggcacaattttaactatgaaacagcaagaaagagattattgcttaggatgttttctaaaagcttttttcctcagaaaaatcccaggcacagtggctcacatctgtaatcccagcactttaggatcccaggcaggtggatcacttgaggtcaggagtttgagaccagtccggccaacatggtgaagtcctatctctactaaaaaaaagaaaaaaaaaatcagctgggcatggtagcatatgcctgtaatcccagctgagacaggagattcgcttgaatccaggaggcagaggttgcagtgagccgagatcatgccactgcactgcactccagcctgggccacagagtaaggctgtgtctcaaaaaaaaaaaaaagaaagaaagaaagaaagaaagaaaagcataaagttcctaaataaaggctcttctcatcatttttaacagatataactttatctccttacctaactctggataagacctacctgtatcatttaatatgctaacaggttaaacaaaggtttgtatccttgggcccattagtcacaacttttcagatttcaattaaagatgagcaatctgaaatagcaaaaaatccaatctccaaactgagctgaaccaaagctaacaagaataattcttcctaagattactagtatgtagcgactcagatactggaaatcaccaaacaatgaaaaaacggcttagaagccactgtgctcccgcccgcaagttttaataacaaaaaaaaaaaaaaaaaagaaaagaaaatcttgtttaactacataaagtttttctcatgacaaccttgtgatatgtatgaagtatgctggaaagaaattttctttttaaatagtagatatttaagaaaaatgtaaacattatagaataaatttaagaaattaaaggattcctagcgctttatttagggctgcttatactaaccctacttccaaaagactcagcaaaacttgagtcctgatacatctagcttttcaattagaaacaaattactcaacacatttggccttctcttgcgccctcttctggattaaaaaaaactgttcctctttaggtttgtgagcaatggattaccaaagcctacctcaacatgttacagataaatttcaaaaatattgtaatgttttcttagttattagcattatgcatgtcaaagcaacagtactgtgaccaaatcatacactcgccccaaactgtttacattctgtcaaaactgctaattccagtttcctcctctttatccaccccttccaagacaagaaatatttggaggaataccaccttgaatggttcagcggttgcttccacatgtagagagaagtctggcaagagtatattaacctgaccgatgagatacaatttttcaatctcaacagtaatattgccttatgcagccataatatggtagtattttctcatcttttgaacaagatctaatgctaaaaaatctagttatatagtccctaacagtttttaaactgttccaaatctttaggattaaaacacctaactcgtgcgtatgtgttcacttctattgcatactatcgggtccctacgaagtcccaaaatggaaaatctgacattctaatttcagtcttcaagttacaatctgcaataaaaaagcacttagtatttctccagctctcaacaattccttctatcaaatttgatacgctgggtttaacatacgctttcttacgcttcatttctcttcgatttataaagagcccttattttttaaaatctgcgtgggttataaactattaaactcacttctcgtgaaatactttcttacatgacttttaccctcaatttctcgtttattaagattagtttggggatcaatatcgattttaaaatacgaaaaacacctttctttttaacacggagagaagcctcatccgaggcaagatggtagtagtctaacctcatggatgagccacttgggttcacccttaaggacaagaaagaggggtcaaaaagctcgcactcttccccatcctaacattttttaaaatccctcacctcaaagacactacccaagctcagaaggtaagtgctgggtcgggaggggaatggaacaaggtttttggattttttttttttttttgtagaaaatgagctgctagaaggaaaaggcccaagtgaaagcctcagaggcggagtcgtgagcgaacctggcaggagacgaggttcctgtggcagagaaactcgtgaccggggagctgggttcccgctgggtaccccacccggcctcaggcaccgcctctacccgaaatgaatccccccgccgcccccccaggcctcctgcctctaggagcgccgcggccgccgcccgcggcctccttccctctcagctccgcttcgaggccggctccccgccccgactgcccgcgcctcccgccgcacccgggagcgggaaacgcggccgctggcgcgcggggccctgcgcaggccgctcccctcgtggccgcttccctcccccaccccaaccgcccccgcccctcaccccagggacccgcccggggccgcgcgccgccaccgggttacacaaccccggccggcgacgggggggggggcggccgcggtgcggggggcgccggcgcccccgcagtgcagggggcgaggctgcggccggtggtgatcccgggtcacccggctccgccgccccgtgtggccctcgacacccttccccctccgctcctcagtgggccggagtcggtgacaggaatcggcttccaacatggcggacaggaagcggccccgcgaggaggagagaacattccagccgcgccggctctggggggagcgggcgcggggcgccggcctcgggaggagccgcgggacaagactgcggggtccggcgcccaaaaagggcgtttagtggtggaaatgacccgtgagatgaggggtcccaacagccccccccaccgagacggggagccccaaggccacaggtgggcttggggtggcgggtgaggggcacttcctcaactcaccctacctacccactcctcgccgcctgcaaaagggtctcgcgacaccatccgagtcgggattcgctaggccttcctgagttacacctcgagggattttttgggggggtaggtttaccccatctcagggcccccaaattgaggtaactccagggacgcagggaggtgaatgggaaaagaataatgaggttggacttgcaaggccgacccagcaggtctcccttcagccggggccggggccaggaaggtcacgctggcctggctgggcctctcccatgctggagggaaggagagggcgctgcaaaccccattgctcagcccgagctctagaatgaaaggggcatccccagagccggaggggacacacacacacacaccccgaccccgtccgcgcttttcggatccagccccacccccatctctcctgtcctccacccccaacccccttcccccacccgtcctccctcccagacctgttttcttcttcggcgtttcctggtgctgctggagggtgtgtttctgctcatgtttcagcggctttggctgggccttggggctgccctcggctccatgctgcaggtattggtgaggctgctggtgatgatggtggtggtggtggttgtggctgtggttgtagaaataataatggtggtggtggtgcggctgctgctgctgctgctgagggtgatggtgcggatggtggtggctgtgatggtgctgaggctgtggctggccgggcttctcctccattgaaagcggctgggactccctggctgaggctgcgggctgctgcaccgtcaggatctgagactgcttctcagggctcactcagtatatctgagcgcgtctcgccagcgcactggttaaccgagcgattctgcgagattggcagccgcactccaacaatcaggagccacgctgtgccgcaagccccgcccccagctcaaatcctctttccttccccttcgccgctgccgcctggccaacgccacttaccctgtgcaacctcacagggccgggccttcaacgtcagcactatggctctctcttctgtcgctttctctccttcaccacgcagtctgtgaacagcactttctacactcctcgccggcaagcaggctcgtgtcgagggtagcagattccactggcgattccactggtgctgtgagccatctgctggctttgcacctcttagaatctggtgtttttttgttttttgttttgttttgtttttaatccttttccgggtaaccagaaagggaagctcaattcccttaaccccgagaccactaaaggggcaatacaaaaagaggaaataaatacatttttaagcatacaagagcttcacaatccagtagatcattttgtattctggattcattttgctttgtattcatatgctaatctcttcctttccacgaagggattatagggttccacaatggggtatctgtgtaattttctaaaagggcacaaagggtttaaatcattgtttctttgtagttggaggcaagggagagcaggaggaatgaaaatttacactgaaggtttttttttttttaattaaactctgcaggtgaggtcaactgtggaaccaaaataggttttagaatgagaagtttcaagagcaaaggaaggggagaaagagcacttaaaagttattaagtgggtttgttttttttttttttggcacttatggaaaaattgaaattaaaagaaatattctgtagcgttttgtagtgtagatttaacttatcctgcattaccacatcacagtatatgattttcaaaagcaaatgttagagccatgatagtggttactcaggaaggaagagggttgtgatggggagggacacaggttactctgataatatttcattttgggggctaggtggtgattacatatatttgcttagtaattatttgttaaactgaatatacagataaaatgcacttttcccaatgtatgttatagattgggggatttttttaattgtaaaatattcataatataaaatttaccatcttaatattaagtgtatggttcaggtgcattaggtacattcgtattgttgtagaaccatgaccatcatctatctccagaactttttcatcattccaaactgaaacttcatacccaataaaaataaatgtcctttccctcctccttccatcccttgataaccactgttctgttttctgtctctacgaacttgactattctaggtacctcatataagtgggattgtactgtatttgtctttttgtgactagcttttttgcataatgtcttcagagtagcatacatcagaatttccctcttttttaaggctgactaatattccattatatgtatataccacattttgttcattcactcagcaacggacatatggactgtttcctcaatgtatgttacgtttttgaatttttaaaatgtggcttgaattcctacaacaggacaacattaaaggaacaagaagcttgaaagcaaaaagtttatgctatgaaattaatgaatgtcaatgcaaaagcttatttaaaacgtaaaagctggtttccaataacaaatgtcattgaatcctgaaaaccatgaccaaattttggcatgttctatacagtaaggatttgtgttgccttgttaaattttattttattttattttgagatggagttttgtccttgttgcccaggctggagtgcaatggcatgatctcagcccaccgcaacctctgcctcctgggttcaagcaattctcctgcctcagcctcctgagtagctgggattacaggcatgcgccactgtgccaggctaattttgtatttttaatagagatggggtttctccatgttggccaggctggtctcgaactcctgatctcaggtgatctgcccacctcagccttccaaagtgctgggattcatgagccaccaggcccagccagctttgctaaattttaaagaaaaacctctttgggggtacatttacccaattttgagaatgaaaaccctaataataatatcatatcacaataagtctttaccactgaataatattctgccacgttcccaattattaaagaaaaaacaggtcaggtgtggtggctcacacctgtaatcccaacgctttgggagaccatggcagatcagttgacccagcagttcgagaccagcctgggcaacatacagagactctctctctacaaaaatttttaaaaattagcctggcatggtggtgtgtgcctgtagttgggaggctgagatgggaggatgacttgagccctccaggtggaggctgcagtgagctgtgattgtgccactgtactccagtctgggcaacagagcgagatcctgtctcaaaaaaaaaaaaagaagaagaaagaaagaaaagtatatatacaatttaagattatgttggtattttttgttgacttagacattcagttggaaggcttgaatttctgagttccaacttccctgtctaggttttctacattatacctgcaggcaaaccaaaagcactcattctgtatttctgatttatcacacttttgcctacctttagcttttcacttacagttgtactgactgagtttaataaactaaatcttattctcagatgctctagttactatgaatgttgccttagtagtatgcagtagtatgaagaaaggcttatgatataatgtaagaaaaaaagcagaatattacattcttgtatacattagaatcataatcttgaacacgaattttaaaaataagaatggaaatacaacagtaaaacacagaccttttttcttcttgatttttctgaagttgttttatataaaatataattgggatttgccaagaatgtgaaatattccattataataatgcccttagccgggcgtggtggcacactcctgtaaacccagcactttgggaggccaaggcaggcggatcacgaggtcaggagatcgagaccgtcctggccaacatggtgaaaccccgtctctactaaaaatacaaaaattagctgggcacggtggcacatgcctgtaatcccagctactcgggaggctgaggcaggagaatcacttgaaccagggagtcgtcggaggttgcagtgagccgagattgtgccactgcactccagcctggagacagagcaagactccgtctcaaaataataataatagtaataatgccctaatactaaacttttggtgagaagaaaataactgggtctacttatttcaagcatgtttttataaaacggaatctgcattaacgaagaaaacacaagaagggaatatagcataagtctgatgaaattataggtgcttctttttttcttttctctgttttccaaatgttctgtagtagttgttacttttcatatacattttttttttttcttttttgagacgggcctcactgtgttgcccaagctggagtgcagtggtgccatcatggctcgctgcagccttgaccttcctagctcaggtgatcctcccacctcagcctcccaagctgggactacaggcacatggcaccatgcctggatgattttggggtgtttttttgttctgttttttgtttttttgttttgttttgttttgtttttgagacacagtcacgttctctcacccagcctggaatccagtggcgcagtctcggctcactgcaacctctgcctctgaggttcaagtgattttcctgcctcagcctcccaagtagctgggattatagtcatgagccaccgcacctgggcttgtggaaattttaaaagtaatctatttttgtatttttttatttttccccaaagatctcacaaagtcaatttttttcttcaatttctgctgaccagaatccagaagtcattagaaatttctgcttttttttttttttttttttttttgagacggagtttcgctctatcgccaggctggagtgccgtggcacatctcagctcactacaaactttgcctcctgggttcaagcgattctcctgtctcaggcttccaagtagctgggactacaggtgcacgccaccatacccagctaatttttgtatttttagtagagacggggtttcaccattttggccaggatagtctccatctcttgacctcatgatctgcccaccttggcctcccaaaatgctgggattacagatgtgagccagtgcggccggctacatttttttttcttaatgagagttccccaaaacctggattcacctctacttatgatcatttcggaattcgacttagaagtattgtaattgcagtaagtactttaaaggattatatttcataacaatatggaagaatgtgggcaccagtaactcaagtacaaaaagcaaagcaacaaattatatgtatgtagtatgactgcatataaaatataaattcaggcttggtgcattggcttaggcctgtaattccaggattttgggagactgaggcgggcggatcacttgaggtcagggctcgagaccagcctggccaacatggtgaaaccccgtctctactaaaaatacacaaattagccgggcatggtggcgggtacctgtaatcccagctactcaggaggctgaagcaggagattgcttgaacccaggaggcagaggttgcagtgagccgagatcatgcaattgcactgcatcctgggtaacaaaagcgaaactccatataataattatatgtatatatataatttcagccaggcacggtgggtcgtgcctgtaatcctagcattttgggaggctaaggtgggtggatcacttgagcccaggagttggtgaccagcctgggcaacatggcaaaaacccatctctaaaaaatgcaaaaaattaactgggtgtggtggcatgtgcctgtggtcccagctacttgagagactatggtgggaagatcacctgaccccagaaggtcaaggctgcagtgacccatgattgcaccactgcactgcactccagcttgggtgtctcaaaatatacacatatgtattttttatttatttttaaagtaatgaatatacatatatatgtattttttttaaggaccatgagagaatttgaaaaatgaaagcaatttttttttttttttgagagggagtctcgctttgttccccaggctggagtgaaatggtgcaatctcggctcactgcaaccccggcctcctaggttcaagcagttccctgcctcagcctttcaagtagctgggactgtagggactacaggcatgtgccaccatgcctggctaatttctttgtattttttagtagagacgggtttcaccatgttggccaggttggtctcaaactcctgacctcaggtgatacaccccccctcagcctcccaaagtgctgggattacaggcgtgagccaccatgcccggctgcaataaattgttttattcatttgttcactcacaaatatgtattatgcaacttttatgtaccaggtattatattttttaatttttttcatttatttatacagctttagaaattggttaagtttatttgcaagactgtctcaattatcaaatgaaaattttcacaggccattaatcttatactttgtgtactatgacaacctaaaagagacagaaatgtttaactctctgggcttcagttttctcatctctaaaatatggaggatgaggtaggtggtctctaaatttgtttctattctagcattccatggtcatattctctgctctttcttcccaaaccacgcatttatttcattataataaaaccgcacaaccgcaggacattttgctgaaaaacatctagttttcaactgtaacaattggctataactttacagaaattataatcagaaacagtattatgtcattttatataaatggaaattggctctctgatgatagttccagtttcaaaatgaggcaaatcactggtaacattcactgttttatttcagcaggaaaagaattttattaatgtatatttcttttagatcttaaaatttttgcctagagacactaacttcaaaaactttcaaaggaatggtacagaggtgtggataaattaggttggttttttaataactggaatctgacgatttttctgactatgaaagtttttttaaatgacattttgcgtttttaaaaagtataatggggaaaaagtttgagggagaaactacagcagagtggtgtgtgcataagttttatagtcaaacaactgagatggaatccctttcatgaaactccttatttttatgatcttggttggggagattacttaacctctctaaaccttagtttactcatttgaaaactgagggtaatcttattacccaacacacaaggttcagtgaggtttaaataaaataatggaaaaaagttgtctagtatagtgcttataacatcagtaagtggtactaattttttttttttttttttttttttttttttgagacaggctcttgttctgttgcccaggctggagtacagtggtgcaatctgggctcactgcaacctccacctcctgggctcattcgatcctctgacctcagcctccctagtagctgaaactataggcgcacaccaccatgcccagctaatttttgtattttattttagtttatctgtttttttttgagatagagtctcactctgtcgcccaggctggagtgcagtggcatggtctcagttcactgcaacctccgcctcccaggttcaagcgattctcctgcctcagcctcacaagtagctgggagtacaggcgcccgccaccatacctggctaattttttgtatttttagtagagacagggtttcaccatgttggccaggctggtctcaaacttctgacctcatgatctgcccacctcagcctcccaaagcgctgggattacaggcatgagccactgcgcccggctcacctggataatgtttgtatttttcagtagagacagggtttcaccatgttggccaggctggtctcaaactcctgacctcaggtgatccatccacctccacctcccaaagtgctgggattataggcgtgagccaacgcgcccagcctaatttttgtattttttttttaagagacagggttttgccatgtcgccgaggctcgtactaaatcttaaatgtttgtgatactgagttattagagattagatatatacagctaaactttcagatatttcattaaggaaactgagttttaaagaaatcaattatctgtttaaccaaggatagagtgttttcccaagttttgaaaggaaaggcaaatgctgtcaactgaaattcaagagcacattcaggctgggcacggtgctcatgcctgtaatccctccctttgggaggccaaggcaggcagatcacctgaggtcatgagttcaagatcagcctggccaacatggtgaaatcccatctctactaaaaatacaaaaaattagctggccatggtggcgggcacctataatcccacctacttgggaggctgaagcaggagaatcacttgagcccaagaggcggaggctgcagtgagctaagatcatgccactgcactccagcctgggtgacagagtgagactccatctcaaaaaaaaaaaaaaaagtacattcaatctcaatagcagtcctgtctaagtgtcagattcaaaagtgactttcggccaggcgcagtggctcacacctgtaaacctggcactttgggaggccaaggtgggtggatcacctgaggtcaggagttcaagaccagcctggccaacatggtaaaaccctgtctccactaaaaatacaaaaaattagccaggcatggtcgtgggcccctgtaatcccagctattcaggaggctgaagcaggagaatcacttgaacccaggaggcggaggttgcagtgagctgagatcacgccattgcacgccagcctgggcagcaagagtgaaaccctgtctcaaaaaaaaaaaaagtgactttcactttctttttgtttgtctatttctctaaatgttgaacattaaatatttatttcttttctgtaaaaagaaaaaagcgtttttaaagaatgaattcagcattcaactgtcttataaacattaatctaaaataaagaccaaggttttttgtagccgggcatggtagctcacacttgtaatcccagcatttggcgaggctgaggtgagaggatgacatgaaactaagagttcaagactagcctgggcaacatggtgagactcatctctacaaaaaaacaagaaacttttttttttttttttttttgagacggagtctcgctctgtcgcccaagctagggtgcagtggcgcgatctcggctcactgcaagctccgcctcctgggttcacgccattctcctgcctcagcctcccaagtagctgggactacaggcccccgccaccacgcccggctaattttttgtacttttagtagagacggggtttcaccgtgttagccaggatggtctcgatctcctgacctcgtaatccgcccacctcggcctcccaaagtgctgagattacaggcgtgagccactgcgcctggctacaaaaaacttttttaagattagccagatgtggtggcctgcacctgtagttctagctacctgggagactgaggtgggaggatcacttgagcccatgagttcaaggctgcagtgagctatgattgtgccagcctggatgcactccagtctggctgacagagcaaaaacctatctctaaaaaagcaaacaaaataaagaccaagggaattagtatgccattttggatgccattttaaatctccagcagccgtgatgaatttatgtatgaatgaatcagtaaatatttagttgtcagtaggtatatgcagtatgttggaatcaatagttagatgcaaacagaagtttgtctgaaggtgatccctgaaagtaaaactagtaagactcaacataaactggattaaattagccactaataagaatctagtcagtatgatttgatgtctaagaagctataaaaaaaactacaacttattggccaggcatggcggctcacacctgtaatccaacacgttgggaggcggaggcgggtggattgcttgaacctaagtgttcgagaccagcatgggcaacatggtgaaaacctatctctaaaaaaaaaaaaaaatacaaaaattagctgggcatagtggtgtgtgcttgtagtcccagctacttaggaggctgaggtaggaggatcacttgagcccagcagatggaggctgcagtgacccatgatcacaccactgtagtctagcctgggtgacagcatgagaccgtgtctcaaaaaaaaaaaaaaaaaaaaaaacccacaaaactacaacctattgaatttatttccttcctctattctattttaatgcttcaaattagtatttcacatcgtatgattggtattgttagttattgctactaacaatttatcccaaaacttagtgccttaaaacaacaaacatagattgtctcacagtttctgtgagtcgggaatctgggtgctcattagctgggtgcctctagctcagggtcactcatgaaatcagtgggaagatctacttccaagctcacccatggttgttggtaggacttagttttcaaccccatgaggtgttggactgaagaactcagttcctcatgacttttcactggaagtttctccatagggcagttcacaacataccaattgtctttcctcagagcaaagaacaagagaaagttttcaagaagaagccactgtctttttgtaacctaatctctgaagtggcatcctgttattaatacttctatgtccatttgttagaagtgagttatttaggctgggcacggtggctcacgcctgtaatcccagcattttgggaggccgaggcgggtggattgcttgaggtcaggagttcgagaccagcctggccaacatggtgaaaccctgtctctactaaaatacaaaaattagctgggcgtggtggcacacatctgtaatctcagctactggggaggctgaggctggggaatcgctggaacctgggaggcagaggtttcagtgagctgagatctcaccactgtgctccaacctgggcaagcctccctctgaaaaaaaaaaaaagtgagttattcagtccaacctatatacaaggggaggggaatcacacaagctgtaaatagtcggaggcagggatcactgggggtcttctcacaggggtcaaaccctactacaggtataaaagcattcattcatcaaacttactctgcttgctctgatgtcatcactgtattctgaatgtaattttatttcatatatgagttgtctacagggagagagagtatactaaccagcacacaggtgttccttatcatttattaaattaataagtatttttatatgcttgaattttgtcatttgctagacttgtgattttggttactgtgattccatgtccctaatgctggtcagtatctgaacctgaacttatgaccagatccaggactatagttctgccttgagatggcctacctgagcagataggaggctgctctgggcagcagaagtgacaatataaaatgcatacatgaaaaaaaaaatgcatacatgggccaggcagataacttaacttgagctacgttacttgtgtataagcaaaattcggtgtaagaaacatttctcccaacacagcatcaaattctatagttctattaaaatatatacccgtgtaccttaagaactagatgacttaatttctcagtgcaatatctgcaaaaagataatgcacacacagacacagacatacacaaataagtgcatgtgtaacaggtaaaatctgaataagctctatggattataccagtctcaactgcctgattttaatattgtgctatagctgcgtaaaatgtcaacatttggctgggcgcggtggctcatgcctgtaatcctagcactttgggaggccatggtgggctgatcacttgaggtcaggagtttgagaccagcctggccaacatgatgagacccccgtctctattaaaaacacacacaaaaaaaatgccaggcgtggtggtgtgagcctgtaaacccagttactcaggaggtggaggtaggagaattgcttgaacctggaaggcagaggttgcagtgagccaaggtagtgccactgcactccagcctgggcgacagagcaagaccacgtctcaaaaaaaaaaaaaaaaaaagtcaacatttacagaggctggaggaagcgtacataggaattccctatatgtttctttgcaacctcccgtgaacgtgtaactatttttttttccaagatgtagtctcactctgtcgcccaggctggagtgcagtggctggatctccgctcactgtaacctccacctcccaggttcaagcaattctcctgcctcagcctcccgagtagctgggattacaggcacatgccaccacgcctggctaatttttgtatttttagccaaatatttgatttcctgacagcgtgatccaattgcttcagcctcccaaagtgctgggattacaggcatgagccactgcacctggcccaaaatgaaaagttttttgaaaaataatctgttcccaaagtaaatttagccctcaacgtcttctgtaatttatttatttatctttaaatgtaattatattgtaaagccttacttgctgccaggcgcagtggctcacgcctgtaatcccagcactttgggaggccgaggtgggtggtcaggagttcgagaccagcctggccaacatggtgaaaccccgtctctactaaaaatacaaaagttagcctggcgtggtggcgggcgcctgtaataccagctactcggcaggctgaggcagagaattgcttgaacttgggaggtggaggttgcggtgagctgagatcgtgccagtgcactccagcctgggtaacagagcaagactccatctcaaaaaaacaaacaaacaaacaaaaaattctcacttgcgtaatattgacttagaactaaaaagtattaattagaaaagaggccaggcacagtggctcatgcctgaaatcccagcactttgggaggctgaagtgggcagatcacgaggtcaggagagagagaccatcctggccaacatggtgaaaccctatctctactaaaaatacaaaaattagctgggtgtggtggtgcgcgcctgtagtcccagctactcaggaggctgaggcaggagaatcgcttgaacccgggaggcagaggttgcagtgagccaagaatgcgccactgcaccccagcatggcaacagagggagactccgtctcaataaataaataaataaatcagaggccagacacggtggcacatgcctgtaatcgcaacactttgggaggctgaggcaggaggattgcttaagctcagaagttcgagacccaacctgaataacatagtgagaccctgtctctgcaaagaaatatcttttttaattagccaggcatggtgttgcatgcctgtggtcccggctactcaggaggctgaggtgggaggattgtttgagtccaaggatcacttgtgcccgggagatcaaggctgcagtgagctatgatcgcaccacggcactccagcctgggcaacagagcaagacctgtatcaaaaatttattaattaattaatattttaaaaaatatctggcggggcgctgtggctcatgcctataatcccagcactttgggaggccgaggcgggcagatcacgaggtcaggagattgagaccatcctggctaacacggtgaaactccgtctctactaaaaatacaaaaaaattagccgggcatggtggcgggcgcctgtagtcttagctactcaggaggctgaggcaggagaatggcgtgaacctgggaggcggagcttgcagtgagcggagatcgcgccactgcactccagcctgggtgacagagagactccgtctcaaaaaaaaaaaaaaaaaaaaaaaaaagagagagagagatggagaccatcctggccaacatggtgaaaccccgtctctactaaaaatacaaaaaattagctgggtgtggtggcgtgcatctgtagcctcagctactcgggaggctgaggcaggagaatcgcttgaaaccgggaggcagaggttgccgtgaacagagatcgcaccactgcactccagcgtggcgacacagcgagactccatctcaaaaataaaataaaatatccctctccttaaaaagtttcttttaagacaaagagatatgaatacttatggagcattttgtcaagcatgaaagttatgtctacatacataaggtaaaatgaaactgtttagatcaaagtcactgttatgtatcaaaaggaaaatcatgggtaacttagcagtacagcatggaaatttccacagccgtttgttaaaagcagatttaccatttgtcagttatttagtaaatgttcctccctctatatatccatctatcgttccatccatcaattcatccaacaatgtcttctatcttgaatttgcagaccattgtcacttcttctgtccatcaaatctccctctgactcactcttacagacgcttgtcattggatttaaggaccacccagataatccaggacaagctcctattctcaaaatccctcatcacatcttttcacataaggtagtattaactcttttgccgttatgaggtgatatccattggtttgggggattaggacacggacatatctttctagggaccaacattcagtccactataggggcattatctatagagaattttagaataatagtaaaactgactaaaagtccacctaccttttattatcaccatgtgcaggcaattttatttatattttatttgtttatttatttatttagagacagagtttcgctcttgttgcccaggctggagtgcaatggcatgatctaagcttactgcaacctcaccctcctgggttcaagtgattctcctgcctcagcctcccaggtagctaatttttgtatttttagtagagatggagtttctccatgttggtcaggctggtctcgaactcccgacctcaggtgatctgcccgcctcagcctcccaaagtgctggattaccggcatgagccaccatgcccggcctattttatttatttttgtttatttatttggagacaggatcttactctgtcacccaggctggagtccagtggtgcaattcttggcatactgcagcctcaacctcgcaggctcaagagatcctcccatctcagcctcccaaatagctgggactacaggcatggggcagcatgcctggctaatttcatttattttatttttatttttggagagacaaggtctcactatgttgccctgtctggtcttaaactcctgagctcaagcagtcttcctcctcggcctcccaaagtgctgggattacaggtgtgtgccacctgcccagctggcaattttatttatttattttattattattatttgaaacagagtcagtgagatggagtctttctctgtcacctaggctggagtgcagcagcaggatctcaatctctgctcacagcaaactctgcctcccaggttcaagtgattctcctgcctcagcctccctagtagctgggattacaggcatgctgcacaatgcctggctaatttttgtatttttagttgagacggggtttcgccatgttggccaggctggtctcaaactcttgacctcaagtgatctgccagacttggcctcccaaagtgctgggattataggcctgggccactatgcccagcctccagctggtaattataattgtcagtgataaaatactccccatgggatcagatcactcccagccaccccccttcttggtgcaccactactgaatattccaatacaagctatttggcctgccttagcttttcagggccaaatactgcaaaagacaatttggttgctcatcaccccctaatcttggtatgtctgactccccatccttcaggaatcagtaaatgtcacctcctcaaggaaagttgccctaaatatcctatccagaccctaagtactatcccctgcttttttcctgtatttgtttctttcacaccactcaccaaaatttgtagttattttatctgtaagttaacttttttccatctcccttactagtttataagctcctatacttgtctgtcatgttctgagttatccccagagcctagcacagtgcctggcacatggtagatgctcaatatatgtctattaccattgtgttctcctcagtttctgtgctgccagcaaagtgtatttgctcaacattggacaaatccttctttcttcatctcatgtccattactaaaataaaatagctgcttgttgtctaagattggtgaaatagaaagccatttagcagcataattcagaaacagctgcagcatcatggatcttagtaaagttgttttctctcattccagactccaactctggcgtgattagggatgttttattctgaaaattcatggagatacaataagactgaatcataaaataaactataaatgtagcattaacatttgaaaagggacctatatattttgctcaggcaccacattaggaacgacaggaacccagtcaggaccccaaacttgtcaagttccaaacataaatcatcaatttcctctctaaaccacatgctcctcttaatttctttcagcatttcttttcagtaacataactgttcacctggttagttctccaggctcaattctgggatttcttttctttccttttttccctaccctctcattagtgctggtatgggctctcttttctactctctacattgtcttcctaggagatcttacccatttccagggctaaaatattatcccagtagtgttcactcctaatatatgtcctcagtcctctcctctgagctccagacatgcagttgtccagttgtggtatctttttagatacatcacaagcaattcaaatttatcatgtccaaaaccaaactctggccagccgccgtggctcatgtctataatcccagcactttgggaggccgaggcgggcagaccacttgaggtcaggagtttgaggccagcctggccaacatgttgaaaccccgtctctactaaaaatacaaaaattagctgggtttggtggcacgtgccggtaattccagctactcaggaagctgaggcaggagaatcacttgaacccaggaggcagaggttgcagtgaaccgagatcatgctgctgtactccagcctgagtgacaagagcaaaactccatctcaaaagaaaacaaaacaaaaacaaacaaacaaacaaaaaaactcttagtttttcttctccaaatccctttctctctgatcttcaccatctgtaatgataccaccattccccagtgtcttgctccagaaacttaggagtatacttgtttcttctttttctcccacccccacaactagttcattgataagatctatcaactctatttacaaatgtatactaattggattttcttccttctatatcctctacatcctagtctaagctacaatagtctcctaataggtctctctactttcattctttttttccccctcagtcttgctgtcatcctatctactttctttcttaaactcctacccattcctgcacaaaacacatggcgtaatcttaaaacataaatctaatcactccattccactctaagctcattttatctcactctctgctcaaccactgtgtcaccaccattcaccatgacttttagggctttgcccaagtcagagccttagcacattctgtttattctgctcttcccatagtagattcctgctcatcctaaggcttgatttaagtgtcacttcaaataatcttttccttcctgccctgtcaaagtatttcttgcctctcctactcttatttgcatgtattgtatcctatacattttcttcataacaccttatgtaattaatatatttgattaattttcctccctgggaactatgtgttgtctgctcatgtatatctagctcctagtgcagtgtctggcatacaacaggtatttaatcagttgttgaacaattaagttgtcctattctgttttggcctataggttacaagtgtgatgcatttgcacaacgttgcacagaaggaagaaaaaaaaattttttgagacagagtctcactctgttgcccaggctggagtgcagtggggcagtcacagctcactgcaacctccacctccccaggctcaggtgatcctcacacctcagcctcctgagtagctgggactacaggcgcacgccaccatgcctggctgatgttttctatttttgtagagatgagatctctctgtgttgcccaggctggttgcaaactcctgaggtcaagtgatccacccacctcaacctcccgaagtgctgagattacaggcgtgagccactgagcctagccataaggaagaaattcttattccttcatttcatgtccatcacttctaaaaagtcacatgtctaagactaatgacagagagagccacttatctccatagtgcagaaatagctgcagtgtcatggatcttagtgaggataatatcttttcccatgattaggaaaattccatactgaatcttatagaaatttcatttaacaattgaatcataaaatacaggaaggattaatagcataaggggggtagaacagaaaagttttacctggcacaataagatattttctttaaacttctgagataaccatacagatgtttctttttgcacactttcaaatcatctcacaaaaatagacaacatctgtggcctgtgctggccagaagtatgaaagttgtttacagaggcataattaacccaccaagaggccttcatttccataaagaggggaggcaaactaatttcagataaatctggtgtagtaatttgacctaacagaaaagtgagactacatttaccactgtcttttgttttgttttgttttgttttgtttttgttttagagacagagccttgctctgtcgtccaagctggagtgcagtggcgtgatctcggctcactgcaacctccgcctcccgggctcaagcaattctcctgcctcagcctcctgagtagctgggattataggcgtgtgccaccactcccagctaattattatatttttttagtagagatggggtttcaccatgttggccaggctggtctctcctgacctcaggtgatccacccgcttcagcctcccaaagtgctgggattacaggcatgagccaccgcacccggccaaccactgtcttgaatcttacacaagatgacagtgtccaaagcagtgtctctacctcaactatacttcagagctgttttgcataccagggcttcccagcaaccaggcctcatctgctatccctcaagcgcacactctttggtctagctcgaaagtgctcaaagctataatagcattcaaacaataacaaaaagccctcagatttccttattgtctatctttgaacagttcaaagagcttccacatttatttttttcatagtgctttctctgtcacactatgacgtaagaaaatctaagattagagaatctgaagttcaaatggtttgttcaaagctgcagtgaaattacatatcacaatcagaatccattctctcatttcccactagaccatgtagtttcccaagggatttgaaaccttttatgaaaaaatgttaaaactacatataattatgagtcttgagcattttttttctaaccttcttcacacagaaaaaaagtgttattttgtggtttttaaataaaatggctttgcgaggacaggcttctaaattgcctcattctaaattcacattgaaatgatcaaaggaataaaaatagagggaaaattttccatatgccagaaactttgaggaatttctgctagttagaacatagacgttcccaattagaaggagaggtcagatcaagattctacttctataaaatatcttatcaccccattagagttctatgaacaccccattactcagggttgaagactaggtgagggcagtggaaagggaagataggggatatactaagacccattccagttcttttctttttttttagacagagccttgctctgtcgtccaagctggagtgcagtggcacaatctcagctcactgcaacctccacctcccaggttcaagcgattctcctgcctcagcctcctgagtagctaggattaacaggcatgcaccaccatgcccagctagttttgtttttgtatttttagtcgagacggagtttcaccgtgttggccagactggtctgaactcctgacctcaagtgatgagcctcccaaagtgctgggattacaggtgtgcaccactgcgcccagccacattccagtttctaatagaattcaccgcaatcttcatttaagtattatcgaaagctggacaaccatagacctctttatgttaagatgagcaagtggtggccaggctcagtagctcatgtctgtaatcctagcattttgggaggctgaggcaggaggatcgcttgaggccaggaatttgagaccagcctgggcaagataaggagactctgtctctacatcccaactacttagaaggctgagatacgaggatcgcttgagccaggaaggtagaggccacaacgaatcacgattgtgtcactgcactacagcctgggtgaccaagcgagactgtctcaaaaaacaaaacaaacaaaaaaaaaacaaatggagaaagatcataggactatgaaaagatgctataggctgggcacagtggctcacgcctgtaatcccagcactttgggatgctgaggtgggcagatcacttgaggccaggagtttgagaccagcctggccaacatggtgaaacccatctctattaaaaatacaaaaattagcccggcatagtggtgcacacctgtggtctcagctactcaggtgactgaggcatgagaatcgctgaacccaggaggcggagtgcagtgagccaagatcatgccaggcgacagagcaagactgtttcaaaaaaaataataataatctctgaggaacaaaagtcaagctggcctcagaattctgcaactctgtttttttattttatttattttattgagactgaatctccctctgtcgcccagtctggagcgcagtggcgtgatcttggctcactgcaacctccacttcctgggttcaagcgattctcctacctcagcctcccgagtagctgggactacaggcgcccaccaccacgcccagctaatttttgtatttttagtagaaagggggtttcaccatgttgaccaggcctgacttgaactcctgacatcagattatctgcccacctcagcctctcaaagtgctgggattacaggtgtgagctaccagtccaggcagaattctgcaaccctgtaagccacaagtcattaaagcatatagtacagaattctgagggtaatttaagaattcgacattcagctaagttgtcatgcaattgtgaagacctcagaaataagtactcagatataaaagactcaaaaatgataccacccaggttatctgttctgaaagaaaactgctcaaagatatacttttgctgaatgagaacttaagaataaaaaagaactataaaagaggctgggcgtggtggctcacacctgtaatcccagcactttgggaggccgaggcgggtggatcacgaggtcaggatatcgagaccatcctggctaacacggtgaaaccccgtctttactaaaaatacaaaaaagtagccaggcgtggtggcaggcacctgtagtcccagctactcgggaggctgaggcaggagaatggtgtggacccaggaggcggagcttgcagtgagccgagatcatgccactgcactccagcctgggcgacaaagcgagactccgtctcaagacaaaacaaaacaaaaaacagaaacaaaaaagaactataaaaggacttatacataatagaactttacttaaatgtccaaaataacttttgtaagaaaaaattgtaatgtaaaaaaagaaatgtctttttccaagaagaataataaaggtttaaaaggacaaacaatattaataaaactgagctgggagggttgggagtgggaggtaaagaatgagggaaaataaaagtatgctaaataccccaatcatacacaggagaaatcaagagctgctgtttcattttaacattgaaaataggtgggtttttttaaaatttaaaggtaggcacttttagaataaaacccagatgatcatctttcgaagcagtagacagcattttaaaagcaaagaaaacagttcatatagaaatagacaaaaggccgggtgctgtggctcacgaggcccaggcgggtgaatcacgaggtcaggagatcgagaccatcctggctaacacagtgaaaccctgtctctaccaaaaatacaaaaacttagttgggcatggtggcacgcaccagtggtcccagctacttgggaggctgaggcaggagaattgcttgaacccgggaggtggaggctgcagtgagccgagatcgcaccactgcactccagcctgggcgacagcgcgagactctgtctcaaaaaaaaaaaaaaattaagatgattaaaataatctcaaacatcagaacatctattcaatccaagctataccagtgtgtgtatgtgtgataaacaatatcttattcattcatttatattccttaatcttatagatcataaagtcatgaaaattaagttagtaaaacatatgaaatgctataagagccgggtgcggtggctcacacctgtaatttcagcactttgggaggctgagacaagcggattacttgagcccaggagttccagaccagcccgggcaacatggtaaaacctcatctctagaaaaaaatacaaaaaattagccaggcatggtggtgcatgcctgtagtcccagctactcgggagacttttttttttttttttttttttttggagagggagtctcgctctgtcgcccaggatggagtgcaatggtgtgatctctgctcactgcaacctctgcctcccaggttcaagcgattctcctgcctcagcctcccgagtagctgggactacaggcgcccgtcactatactcagctaatttttgtatttttagtagagatggggtttcaccatgtttgtcaggctggtctctaactccccacctcaggtgatccgcccaccttggcctcccaaaatgctgggattacaggcatgagccaccgtgccgggcctacttgggagattgaggtgggaggattgcttgagcctaggaggttgaggctgcagtgacctgtgattgcaccacttcactctagcctaggtgacagcgcaagaccccatctcaaaataaacaaaattatttctatggtaattccagtttgatttaaaacatagaaatgtacacacagctatatagcataatgattgagattatagacttttagatctagatttgcatctcagatctaccatttactaatgacatgaccttaagcaaataaattgatactctcagcctccgtttactcatttataaagtaagaataaaaatatcttctcatataactattgagaggattacaagagttaatatgtttaaaaaggaaatgaagtttcctggcatattcagtaaataactagtatatccttatgtatgtgataatttttttgagacagagcttcactctgtcacccaggctgggagtgcaatggtgtgatctcggctcactgcaacctctgcctccctggttcaagagattctcgtgcctcagcctcctgagtagctggaattacaggcatgtgtcaccatgcccagctaattatttgtatttttaggagaggtggggtttcaccatgttggctaggctggtctccaactcctggcctcaaacaatccgccagccttggcctcccaaagtgctgggattacaggtgataactatcataaatatatgtgtgcacctacccaaacatacacatagaaataaggctgagctggccaggcacggtggctcacacctgtaatcccagcactttaagaggccaatgcaggcaaattgcttgagcacaggagtttgagaccagtctgggcaacatggtgaaactgtgtctctacaaacaatgtaaacaattagccaggcagctgggtgcggtggcttatgcctgtaattccagcattttgggaggccaaggtaggtgtatcacttgaggtcaggagtttgagaccaggctggccaacatggtgaaaccccatctctactaaaaatacaaaaatcagccaggcaggtggcatgagcctggaatcccagctactcaggtggctgaggcatgagaatcacttgaaccctggagacggaagttgcagtgagctgagatggtgccactgcactccagcctgggtgatagagagagactctgtctcaaaaaaaaaaaaaaaaaaaaaaaaattggccaggcatggtggcatgtgcctgcattcccagctactcaggaggctgagtggggaagattgcttgtgcctaggaggttgaggctgcagtgaggcatgattgcaccactgcactctagcctgggtgacaaagcaagaccctgtctcaaacaaaaaaaaaaaagagagagcaagaaaagaaaagaaataaggctgagagagactataccaaaatgttagcaaggattatctctaatgatgagattctgagtgatattttttgtttctttctactttttgcttctccttcatgcttttctgcaacttctaaaatttctacaaagaacatacttgtttttacaattagaaaaaatacattattaaactatataatacaaagtttgtaggatatcagtacaaatagaaatattatttaggccggttgcggtggctcatgcctataatcccagcactttgggagcccaaggagggcagatcacgaggtcaggagttcgagaccagcctggccaacatagtgaatccctgtctctactaaaaatacaaaaattagccgggcatggtggcacatgcctgtagtcccagctacttgggaggctgaggcaggagaattgcttgaatccgggatttggaagttgcagtgagctgagatggtgccactgcactccagcttgggcaacagagtaacactttgtctcaaaaaaaaaaaaaaagaaagaaagaaagaaaaaagaaaagaaatattatgtccacccaaaaacaatgcccactcttggatacctaaaatgcacaaaattatctataaatgcagctgtgtctttcatatagtttaagttcagttttagcaaaacaaaacaaatgtcttttcctttgcatggtgaatgccttggagttactccagaataacattgaattattcacattgaatggtgaatgcctggagttaatccagaataatgtgaaatcaaactttatttcagtaagaacctctaagcctaaaatcctgtaaactgaatcagtcttggtacatgtatctgttccaaaaactagtctccaaatatacagagattagggcttggcactaggagattagatgtggtagacaaatgctacttgatggtgagggtagagatggggtgacggtagaggatgcttaaacccaacatcaatcatttaaatattgttagtaacatttatttctaccccaagctatcctttaccagagtagcatgtaataaacaacatttcattcatttattcatttattctctcaattaatatgtatttaagagcctgctatacatgcagcatgcagcactgtgttaggcattgcgttaacatgaagaacaaaacagatggggggctgggtgcagtggctcacgcctgtaatcccagtactttgggaggctgaggcgggtggatcacttgagcccagcagtttgagaccagcctgggcaacatggtgagatcctactaaaaatacaaaaaaaaaaaaataggctgggtgcagtgtctcacacctgtaatcccagcactttgggagcccgaggcagtggatcacctgaggtcatgaattctagatcagcctggccaacatgttgaaatcccacctctactaaagatacaaaaaattagctgggcatggtggtgggcacctgtaatcccacctactcaggaagctgaagcaggagaatcacttgaccttgagaggtggaggctgcagtgagctaggatcgtgccactgcactccagcctgggtgacagagattccatctaaaacaaaaacaaaaacaataacaaaaagatagccaggtgtggtggtgtggtggtacacagctgtggtcccagatactcaggaggctaaggtgaggtgggaggattgctggagcccatggggtgtgggtgtggaagttgcagtgagctgagatcgcgccactgcattccagcctgggtaagcgagaaagaccctgtctcaaaacaaacaaacaaaacaaaacaaaaaacaaaacaaaaagacaacaacaaaaacagatggtatccctgcctacatagggctaagagcctgttagagaagacaaatacatacacaaatagacatataattgcaaattgtgatgagtactctggaggaaagtataaaatactgtgaaagagaatgagggaggtagggcaggagagggatacctaaacagtctctctgacatctcaaccaggacccaaaagataagagttaggggaggggccaggcacggtggctcatgcctgtaatcccagcactttgggatgccgaggcaggtggatcacgaggtcaggagttcaagaccagcctggccaagatgatgaaaccctgtctctactaaaaatgcaaaaattggccgggtgtggtggtgggcgcctgcaatcccagctactcgggaggctgaggcagagaattggttgaacctgggaggcggaggttgcagtgagccaatacaaaggccattaagatagaaaaaaagcttggagccttggggtaactgaaagaagaccagtgcaacctcttatggaaaggtgtgtgtaggcttcactgttcctcatcccagtaagaacagagcacagtgcaatgatacagtgcacagatggcagcagcacaggtctttctcaggtctgacacctaactttaactttattgctgggccttgtttcagcatcttcaaaatgagaataatggatttccttcctgaatcccttgtgaaaattcactctatttcatctgcacaatacttgccctttttatgatgttacgtaagcatgtatgtcaggtaataatcaacaaaatgtggcatttttactattaaaatgcacattctgaggaagaagagtagaaactccctaccagtataggaagtgaaaggagagaattatattcgcgcattagcaattgtcattcaattccagaaggctaattatgatcatgagctaggtcacctatttttgtgaaagtaaactgttatttgcaaggaaatgctctatttgaagctttctcaatgggaatccactggcttagcctgagagttttcttgtaagttttctagatcgtcatggttttcacttaaactcttgctttgagccatgtggtacctggataagtgtcagaatcaaactgacaagaatatatccagagcgagtctcaccccaacctctaccaccattctgcattggtccttaactcccatttggtagctcttattaaatagtagaaatgtaatactgaagtatcacccccttatcaccttatatagcttttcatagaattttactaccataatttgtttgttaccataatttgctgaacacttgcatgcaatagtttagttaagccctgcaactacactatgtatgagatagtgaattgttgttatttttagtagttgtattttttgtttgtttgtttgttttgagacagagtcttgctctattgtccaggctggagttcaatggcgtgatctcggctcactgcaaccactgcctcccgggttcaagcaattctcctgcctccgccttgcaagtaactgggattacaggcgcctgccaccatgcccggctcattttttgtatttttagtacagaccgggtttcaccatgttggccaggctggtctcaactcctgacctcaggtgatccacctgcctcggcctcccaaagtgctgggattacaggcgtgagacaccgcgcacagcctatttttagtagttgtattttataaagtatccacgaacactgaattagtgaatagcaagccattgctcctaggggatacacagggttaggttccttcgagcctctgatcacaatattttctttttttatttttgagatggggtctcgctctgtcgctcaggctggagtacagtggtgcgaactcggctcactgcaagctccgcctcctgggttcatgccattctcctgcctcagcctccccagtagctgggactacaggtgcccaccaccacgcccggctaattttttttgtattttttagtagagacgaggtttcaccgtgttagccaggatggtctcgatctcctgacctcatgatccacccacctcggcctcccaaagtgctgagattacaggcatgagccaccgtgcctggcctctgataacaatattttcatcaaccaatcaaagacattatgttcaatacatactgttgactccttaacattaaacccatggctgggtttggtggctcatgcctgtaattgcagcactttgggaggctgaggcgagaggatcccttgagctcatgagtgtgataccagcctaggcaacatagtgagacttcatctctaaaaaaatttaaatttaaatttaaaaaaatcattgaactcatggccagcagcattataactcatgcttgaatgaagcttatctaacacacatcttttttccatcttttctccatcacaattttcttgcacttaagaactgtagacagaacttcagcaatacacttgggggccattttaacagtgaaatcaccaataaaaagcacagaaatgtagaaagcatggcactaaatagacgacaacgaggatacttgttacagtatgagagctaaaacaagaaggcaaaacattgccttgttccaccttggctaggaacatgcattttgggcagctcaaatgttttcctcttctgtagtgtcaagcaatgagtgaaaaaacatcatgagtattgattttggggttacaaataaattttggcatgtaagcaaattcataaatacagaatctgcaaatcatgagaataaattataggttaatgattttcacaattcagataaaaaaattgaagatgagagaggttaaagtcacttacccaaagttactctgataataagtgatagagatgggatttaaacacacatctgcccaacaccaaagccaaatgcacttgaccactattatcttctgaagtcctttaataaggaactagttaaacaaattatggtagtaaaattctacggaaagctacataaggtgataagtgggtgatactttagtattacgttcctactatttaataagagcttccaaaagagatcttagatgctatataagtaattttctatttctttctttcttgattctcacagttacccaatgaagtaggtgccatcagaattaccatttaatggattaaaaaattgaggctcaggctgggtgcagtggctcacgcctgtaatctcaacactttgggaggctgaggcaggcggatcacttgacatcagaagttcgaggccagcctggccaatgtggtgaaaccctgtctctactaaaaatatgaaaaggcaggcatagtgatgcatgcctgtactcccagctacttaggacgctgagacaggataatctcttgaacctgggagtcggaggttacagggagccaagattgcatcattgtactccagcctaggcaacaagagcaaaactccgtcccccccaaaaaaaaagaaaagaaagaaaaagaaaaacaaatagaagaagaatcatttcattctgtaggtgtcttattactagcatgaaaaatctttcctcaaagacattctcactcccgccagcagaactgtttttatatatcattagccgtaattatgtcacatgctcatgcctaaaccttgactggcttagaccaatgaaaattcacctcttagcgatagggaggacccagatatctgtatcttaataaaactgggattctgttagaaagaaaaaaatgggaggagggggctggccatggtggctcacacctgtaatcccagcactttgggaggccaaggagggcagatcatgaaatcaggagatcgaaaccatcctggctaacatggtaaagccccgtctctactaaaaatacaaaaaattagccagccgtggtggcacgcgcctgtagtctcagctactggggaggctgaggcaggagtgttgcttgaacaagggaggcagaggttgtagtgagccgagatcgtgccactgcactccagcctgggctacagagcgagactccatcccaaggaaaaaaaaaaaaaaaaaggaggagggaacaatagttgggtaggcaaacagcaagtgtctatcatactgcccagtgcagtggctcatgcctgtaatcccagcacttttggaggccaaggtggggcagatcactttaggtcaggagctcgaaaccaagttggtcaacatgatgatatcccatctctactgcaaatacaaaaatgagtcaggtgtggtggcacatgcctgtagtcccagctacttgggaggctaagacaggggaatctcttgaacccagggggcagaggttgcggtgagccaagatcacaccactgcactccagcctgggtgacagagcaagactccatctcaaaaaaaaaagaaagaaagaaaatatactgcatgggtactaatatcctatacacattatagatgtcattgattaataatggtgctctttaatgagtcatatattcaacatcacaagtttactttttttataagaatactataaataactttctccccaatttacttggatgaaagttgacaacattatgtcccattacccacaaatacagtatgtaattagagtgtaattcctacaaatataaatattctcctacataaccacaatacaattatcaaaatcagcaaattaacactgatacattactaccatcattgtccctttaatgccctttgtagctatagcattcaacccaagatcgtatgttgcatttagttgtgtccttttatctgaaacagtagttcctcaatctttccttgactttcaatatcttacacttttgaagattacaggccaattatttggtagaatattcctcaggtttgtctgatgattcttcatgaatagagtcaagtaatttatttttggcaagattatcacagaagtgatgctgtgtttttctcattacatcctatcaggtggtgcacaatttcaatttgtcctgttagtggtaatgtcaactttgatcacttgattaaggtggtatctgccaggtttctccactgtaaagttactttttcactttgaaattatgaagtattttgaggggaagtattttgagactatacaaatattctgttcctcatcaaattttcactcactagttttagcgtccacaatatttcctggctggttttttgtgggtttgtctgtttgttttgagacagagtctcactctgtctcccaggctaaagtgcagtggcacgatctcagctcactgcaggctttgcccctgggctcaagggattctcgtgtctcagcctcccaagtagctgggactactggtgcacaccaccacaccaggctaattttttgtatttttagtagagatggggtttcaccatatcagccaggctggtcttgaactcctgatctcaagagatctgcccgcctcagccccacaaagtgttgggattacaggcgtgagccaccgcgcccagattcctattttatataattcattactatattatttattttgatgctcttattgtcccgaatttaatcccatagagctagcttctgtgttgtttgacatgctcccattattctttgaatactatcttattttggcacaatatattgttccaagcttatcttgtacttttcatatcccagacctggaataagctgtatttcccagcatccttgaaatcttttaacagagtaccatatagaaaccaagatatcggctgggcagtgcggctcacacctgtaatctcagccctctgggaggccgaggtgggtgaatcgcttgagtccagaagttgaaggccagcctgagtaacatggcgaaacctacaaaacaaaaacaaaaacaaaaaaacagaaaccaagataagggcacttggtgtgctcattgatattgggttgttgctgctcccagaccgtatatgagctaaaggatatatatctgctatagtctgaacatatgtgtcctctcaaaattcgtatgttgaggctcagcacggtggctcatgcctgtagtcccagcactttgggaggctgaggcaggcggatcacttgaagtcaggagttcgagaccaccctggccaacatggtgaaaccccatctctactaaaaaatacaaaaagtagccaggcatggtggtgtgcatctgtagtctcagctactcaggaggttgaggcatgagaatcacttgaacctgggaggcagaggttgcaatgaaccgagatcgccactgcactccagcctaggcaacagagaaagactctatcccaaaaaaaaaaaaaaaaagtatatgtggaaatgctacccctaaggtcatggtattaagaggtggggctgggtgtggttactcatgcctataatcccagtgactcaggaggctgaggtgggaagatggcttgaggctgggagttcaagatgagctgggcaacatagcaagactctgtatctaaaaagcaaaaaaattaggcccaacgcagtggctcatgcctgtagtcctagcactttggggggctcaggcagatgaattgcttgagcccaggagtttgggaccagcctgggcaacgtgacaaaaccctgtgtctacaaaaaaatacaaaaattagccaggcatggtcgtgtacacatatagtttcagctactcagaaggctgaggcaggagaattgcttcaattcaagaggttgaggctacagtgagccatgatcacgcccctgcactctagcctgggtaatgaagcaggactctattgggaataaataaataaataaataaataaataaataaatacaaattttaaaaaattaaccaggcaaggtggctcatacttgtagtcccaggtacttaggaggctaaggtgggaggatcacttgatcccaggagtttgaggctgcaatgagctgattgcaccactgcactccagcctgggcaacagagtgagaccctgtctctaaaaaaaacacaaatgacagagcccttgagaatggaattagtgcccttataaaggaggcctgagggagttttttgcccttctgctgtgtgaggacatatagaaggtgccatttctgaggaacagggccccttgccagatgtcaaatctgctggcatcttgatcttgggctaggaagcctctagaactgtgagtaataaatttctgttttttataaattacccagtatcaggtgttttgctgtagcttcccaaacacattaagacagtgtctcttatacatttaaatttaaataaatcacaacacttaagctagagccttgctactccacagaccagtatcatcagtatcatctgggatcctatcagcaatacatgaccgggcgcggtggcttacacctgtaatcccagcactttgggaaaccgaggcgagcagatcacatgaggtcaggagttccagaccagcctagccaacatggtaaaacctcgtctctactaaaaatacaaaaattagctgggcgtagtggcatgcgcatgtaatcccagctacttgggaggctgaggcaggagaattgcttgaacccgggaggcagaggttgcagtgagccaaggtagtgccactgcactccagcctcggcgatagagcaagactctgtcaaaagaaagaaagaaagagagagagagagagagagagagggagggagggaggcaaggaaggaaggaagggagggagggagggagggaaggaatctcgtcccacaccctagacctactgaatcagactctgcatttaacaagatcctcccaggagattcatcttcatattaaaatttgaaaaggattgagggctgggagcggtggctcacatctgtgtaatgccagcactttgagaggccaaggtgggaggatctcttgagcccaggagttcgagaccagcctggacaatatagggagacctcatctctacaaaaaaaaaaaaaaaaaaaaattgagcccaggaggtcaaggctgcagtgagccatgaccatgccactgcactccagcctgggtgatagagcaagaccctgtttcaaaaataaacaaaaataaaaataaataaaaagcactgagttagaacagtcaccagctagtagcaaagtctactctgggtttactcgcaaaatgtaggtagtaaaagttcatctcctttagccctagaagtcaaggataaaagtatatactcctagccaggtgcagtggctcaggcatgtaatctcagcactttgggaggctgaggtgagttgatcacttgagatcaggagttcaagaccagcctggccaacatggaaaaccccatctctactaaaaataaaaaattagcaaagccgtggtggcgcacgcctatagtcccagctactcaggaggctgaggcacgagaattgcttgaaccttggaggcagaggttgcagtgagccgagatcgagtgactgcactccagcctgggtgacagagcaagactccatctcaaaaaaaaaaaaaaaaaaaaaaaaaagtaaatactccagccagcagtggcatgcacttatagtcccaactcaagtcccaaggccaaggcaggaggattgcttgagcccaggagttcacgtccaatctgggcaacatagcaagaccctgcctactaaaaaaaaagtgaatattgtatcttatttcttcccttgtactactatttttattccctcactttcttcttctcttcctatctgtctgcctgcctcatcccttcctcctctcctttttaaatgcctccttcccctaactaggtgatacacagctttataataagaactatttgttctgcaagtttacagtgtagtaggcagatatcaaaaagtctggctagtgatttacacactaacttcaggggagctatatctaaagagtacaatgaaataaagcccagttagattgctctagtttcagaattagctccaaatcagaggaaaaattatttttcattatttttcttactagaaaatgttagcatttcaattctagaatcagataaacctggattcagatatcattcttcaactgtgggctgtgtaatcgtgagcaagtcccttaaactctctgaacttacatttctatttttggactgcctaagctcatgagctttgtaattagagagactagctttcaatcctgcttcttcttcttacttatgtagacttgcgcaaactatttgctctcgataaaatacagacctaggccgggcacagtaaaatacagaccaggccaggtgcaatggttcacacttgtaatcccagcactttgggaggccaaggcagaaggattgcctgagctaagaagtttgagaccagcctgcacaacatagtgagaccatgtctctagcacaaaattttaaaacattagccaggtgtggtggcacacgcctctagtcccagctaccccagaggctgaggcaggaggattgcttgagccaggagtctgaggctgcattgagatatgatcacaccactgcactctaacctaggtgacggagcaagaccttgtctctaaaaaaaataaaaaataaaaaaaatacagaccaggcagggcatggtggctcacacctgtaatcccagcactttgggaggccaaggcaggtggaccacttgaggtcaggagttcgagaccggcctggccaacatggcgaaaccccatctccactaaaaatacaaaaattagccagattgggtggtgtgcacttgtaatcccagctacgcaggaggctgaggcaggagaatcactgccaggaggtggaggttgcagtggagccgagatcacaccgctgggtgacagaacaagactccatctcaaaaaaaaaaaaaaaaaagcaaacctacttcaaaggtttatcatgggaaaatgtatatcaagtgcttagcacagttccttggcacatatcacatgttcaataattattaactttatgttcttttcttccattttgaaataagaataataaaaatctacagcaaaagtgcttgtgaagacttagatgagatgacacacagtctgaaaagtatctggcacaaagttagtgctcagtaaatattagctatgataggcacacagagttgttgtgaggactcattgggataagatgtatgatactcataatcattgttgtcctctcctgacaaggggaaattctcaccctgaattcagagaattttgactataccattttttgttttttggatttttttgacatgagtctcgctctgtttcccagactggagtgcagtggcgcaatctcagctactgcaacctctgcctcccgagttcaggcaattctcctgcctcagtctcccgagtagctgggattacaggtgcctgccaacataactggctttttttttttttttttttgagatggggtctcactctgtcaccaggctggagtgcagtggcgtgatctcggctcactgcaacctccacctcctgggctcaagcaattctcctgcctcaggctcccgagtagctgggactacaagcacgtgccaccaagcccggctaagttcttgtatttttagtagagacggggttttatcatgttagccaggatggtctcaatctattgaccttgtgatccgccctcctcggcctcccaaagtgctgggattacaggcatgagccaccgcgcccagcctagttttcatatttttagtaaagatggggtttcaccatgttggccaggctggtctcgaactcttgacctcaggtgatccacccaccttggcctcccaaagtgcttggattacaggcatgatccgccacacccgaccttaactatactgtttataacctgcgtggggttttaaaaagccattccaggctgggcacggtggctcacgcctgtaatcccagcactttgggaggccgaggtgggcgggtcacctgaggtcaggagttccagaccagcctcaacatggggaaaccccgtgtctactaaaaatacaaaattagccaggcgtggtggtgcatgcctgtaatcccagctacttgggaggctgaggcaggagaattgcttgaacctgggaggcggaagttgcagtgagccgagatcaagccattgcactccagcctaggcaacaagagcgaaactccatctcaaaaaaaaaagaaaaaaaaagccattctacaccttgcttaatccctacacttatcacttatttacatcctgcgatgctctagaagtcagcaaccaggcatttcaattcagaccagtcttggtagtgtccttttgatcctaaggtcctgctcctgaaatggccggtgccatccagctcttcccagatgaatggctggaccagacgtcacaaagagaaaaggaaaagcagatggaaaggaatgttccaaaatctttaagataaatggcaaggactacgtctgcctgggaaaccactttaaaggccatgcaaaggataaaaggaggaccagtggaaagagcagtatccaattgctatggcaactgaaattttgcaaataaatacttcagcatagcttgtttatcaaacacactgacctattctttctgttctttggtccccctcctgcttcctcatccttccttcattagtatacacccattcctaccataccttgggacaaaaggaaaagtactccctctgagccattccccccaccaaataaaatctagcagtatactgtttgttcatacactggaacaggaagtgtctttactatatatcatgaactctgtccctttacaggtgttgtcatattgagctcctgggaagtatggtaagccaggaaccttttcaaaatcctgacaatcaaaggcacactggtgtactaatgactagctgagtcaccaaatttctctaagcctccctttccctgtgtgcatgagggaaatactgctctaaattatagaaaatatgggcaagatttgggtcatttgtattcttattcaactgacccagtttgggcccagtctctctttctagcctaagctctcactggtctcctgtgccttagccaaacacgtctacttgttcctggcaccacatttctgtgccttggctcttgccattctttctgcctggaacaccctctctccttctctccatttcctccttctatttcattaaactctcatctgtcttcctatatgtctcaaaccaaatagcacctcttccacaaagccttctctgactctatagctggtagagatcttgcttttcttatttgtgtgcttttctggcatttgtggttgcttatgtgcatctttcatcccccctgccacccccagaacaaatgaacaccttgagagcagagaccatgttttcgccttgagcaccccaaattataagtggccttttaactagatgtatccctccccaattaacctttgacttataagctctttgggaccaagggctacttcttgttccctgttatttacccagcacctagctcattgcttggcacataattggtgctccaaaaatattggttaaagtaatgaataaaaatagatgctttgtggggaaatgaagtaaatcagcttgtaaactagagctttaatgggaaaagtatgttgagcagttacagctgtatgggattcattcattcattcattcattcagcagtgatcaagccaattttttttttttttttagacggagtgtcagtctgttacccaggctggagtgcggtggtacgatctgggctcactacaacctctgcctccctggttcaagcaattctcctgcctcagcctcccgagtagctgggatcacaggcatgcaccaccacacccagctaacttttgtattgttggtagaaatggggtttcaccatgttggtcaggctggtgtcgaactcctgacctcaggtgatccactcgccgcagcctcccaaagtgctggaattataggcgtgagccactgtgcccagccggcaatttttctttttttttttgatacagagtctcgctcttcttgcccgggctggaatgcaatggcgctacctcggctcactgcaaactctgcctcctgggttcaagcgattctcctgcctcagcctcccaagtagctggattacaggcatgcgccaccacacccagctaattttgtatttttagtagagacggggtttctccatgttggtcaggctggtctggaactcctggcctcaggtgatcagccggcctcggcctcccaaagtgctgggattacaggtgtgagccaccacaccttgccaaaatttttttttttttttgaaacagggtctcactctgtcacccaggctggagtgcagtggcacaatcatggctcactgcagcctcgacctcctggagctcaagcgatcctcctgcctcagctgggaccaaaggtgcatgccacccaacagactaatgttatgatgattttttttttagtagagatcaaggggttctcattttgttgcccaggctgatcttgaactcctggactcaagtgattctcccacctcagcctcccaaagtgttgggattacaggcgtgagccaccacacctggccacaaatgagcaatgagaatcttgactttatgaaacttatattgaggccgggcgtggtggctcatgcctataatcccagcactttgggaagcagaggcaggattccatctcgaaaaaaaaaaaagaaacatatattgtagtggaacaagtagagaattaacaaataaaaaataaataaattcacattgtgaataaataaacagggcaatgaaatagagtcattttaagtaggatgttatttatagtattgtttgtaggatttcccaacctctgcactatggacattttgggctagataattctttcttgcaaggcgctgtcctgtgtactgtaggatatttagtaatatccctagaggcatgtagtggcctctaaccactacatgccagtaacaaacagtccctagggttgtgactatcaaaaatctttctagagattgccaacaatctctggggatcaaaattacccctacttgagaactactgtgttaaaggggtgcctctttgagtgaatgacatgagctgagacctaaaagacaagacaaaaataaaccttcaacactagtgaagtgtattccaggcaggaaagtggacagcaacacaaacaatgggaccacagtggccgaagataatgagtgaggaggggagtgatatatgatgagattggagacagaggcaaggacatagatcacatagttgcttggagtcatataaggaaacttagatttcattttaaagcagttgagaccataaaagtttcatgtgtttttgttttgttttgcttttcttgagatggagtcttgctcttgtcacccaggctggagtgcagtggcacaatctcagctcactgcaacctctgcctcccaggttcaagtgattctcctgcctctgccttccaagtaactaggattagaggggcatgccatcacacctggctaatttttgtattttttttgtagagatggggtttcaccatattggccaggctgatcttgaactcttggcctcaagtcatctgttcgcttcagcctcccaaagtgctgggattacaggcctgagccactcactgtgcccggccaacaagcttagtttacttagcacaatgtcttcaaggttcatccacattgtatcatatatcagaatttcactcctttcttccatctggggggcctgaagcagggaaggaaaagaatttcattttaaggctggataatattctgtatatacatacgtatatatacacagtatatacatacgtatatatacacagtgtatacatacgtatatatacactgtgtatacatatgtatatatacacagtgtatatatacgtatatatacactgagtatatatacactgtgtacatatacactgtatatatatacagtgtatatatacacagtgtatatatacacagtgtatatatacacagtatatatatactgtacagtgtatatatatacacagtatatatatacacagtatatatatacatatatagatacacagtatatatatacatatatagatacactatatatatgcacagtatatatatacgtatatatatgcacagtgtatatatatacgtatatatatgcacagtgtatatatacgtatatatatgcacagtgtatatatacgtatatatatgcacagtgtatatatacacatatacgcacagtatatatatacacgtatatatacgcacagtatatatatacacgtatatatacgcacagtatatatatacgtatatatacacagtatatatatatacgtatatatacacagtatatatatatacgtatatatacacagtatatatatatacgtatatatacacagtatatatatatacgtatatatacacagtatatatatatacgtatatatacacagtatatatatatacgtatatatacacagtatatgtatacgtatatatacacagtatatgtatacgtatatatacacagtatatgtatacgtatatatacacagtatatgtatacgtatatatacacagtatatatatacacatatatatacacagtatatatatacatatatacacagtgtatatatatatgcatatatatatacatatacatatacacagtatatatatatacatatatatatacactatattttgtttattcatttatctgtccatggacatttgagtttctaccttttggctattgtgcataatgttgctatgaacatgggtgtacagatatctcttcaagaccctgctttcaattcttttgggtcctaaaagtgtaattgctagaccatatggtaattttatgtttatgtttttgaggagctaccatactattttccatagtctcataccattctacattcccaccattaatgcatgagggttccaatttctctacaatctgaccaacatttcttgttttctgttttttggtaatagccatcctgatgggtgtgaaatggtatctcattatagttttttgttttggtttggtttttgtttttttttttttttttgagacagggtttcactctgtcacccaggctagattgtagtggcgtgatcaagactcacagcagcctcaacctcccgtgctcaagtgatcctcccacctcagcctcctgagtagctggggcattaagcgcatgccaccatgcccagctaacttttatactttttgtagagacggggttttgtcatgttgcccaggctggtctccaactcctgggctcaagcgatccacccatctctgccttccaaattgctacaattacaggcatgagccaccacacatggttgacttgtatagttcttcatagattcggaatattaattcattattcaatatataatttgcaaatatcctattttgcggataagatggaaattttaagatttagtgcctgattaagcaaatgctgtgaaacaacttcatcaaaacaagctctagtcttgtttcagcttgctctggaggtctgggtcaaggtgatattaaatagtggcttaaaacagttcatggctgggcccagtggctcacgcctataatcccagcactttgggaggccgaggcaggcagatcgcttgagtctaggagttcgagaccagtctggccaacatagcaaaacccgtctccactaaaaatacaaaaattagacctggcgcagtggctcacgcctgtaatcctagcattttgggaggcagaggcgggtggatcacttcaggtcaggagttcgaaaccagcctgaccaacgtggtgaaactctgtctctactaaaaatacaaaaaaattagccagctgtggtggcgggtgcctgtaatcccagctatttgggagaccgagtcaggagaattgcttgaacccggaaggcggaggttgcagtgagctgagatcatgtcactgcactccagccagggtgacagagtgagactccgtctcaaaaagaaaaaaaaggaatataaaaattagctgggagtggtggtgcaggcctgtaatctcagctactctggaggctgtggcacgagaattgcttgaacccgggaggtggaggttgcagtgagccatgattgtgccactgcactccagcttgggagacagagagagactctctcaaaaaccaaacaaacagttcatatctactccagagaaccctcctgagaagctggttgtgtttcacatttaccccctagatattttattttcctcctgagaatcaaggcagaggaagccatgaatgtgagagtcaaggtaaggctggaaataaaagactgtcctattcttatcacagatggattattctcttattttctaacttagtctgtaagtttcttgatggcaggtactgctatataaatttaaaaccaatattctattcagcacctagcacatcagcctttacatagtaaatgctcaataaattattgtttattgacattaattgattaacaattcctataattctagaagattgtcatggtctatattgtctcatatgaataataacagattgcattcttacttgaatatttgatatcaaataaatatttgtataaagtatttataaaattataaaataaagatatgctacaaagcttcttctttctttttcttcttctttttttgaaataagatcttactctgtcccccaaggctggagtgcagtggcacaatcatggttcacttcagcctcgacctcctgggcccaagcaatcctcctacctcagcttcccaagaatctgggagtatctgggactacaggcatgtgccaccatccctggctaatttttctgtagagatgggattttgccatattacccaggctggtcttgaactcccgactcaaccgatctgcccaccttggcctcccaaagtgctgagattataggcgtgagccaccatgcccagctaaaatttatttttaaattcaatagacatgagggccaggctcagtggctcacacctgtaaatccaacactttgggaagtagaggcgggcagatcgcttgaggtcaggagtttgagagcagcctggccaacatggtaagaccctgtctctactaaaaatataaaaattagctgaatgtagtgtcatgcgcctgtatcccagctactggggaggctgaggcacaagaatcacttgaacctgggaggcagaagttgcagtaagccaagatcgtgcccctgcactctaacctgggcaacagagtgaaactgtgtttcaaaaaaaacaactttgttaatcactagacctgtgatagattgggaggattcaaaggtggacaaggcaaatccttagaagaatttgcagtttcatagttaagtagacaataagcagcaaacatgccatgataatggagtgctataacacaggtaagcactggatgccatggggcagaacataaggaacacctaactcggttcataattggaagaaagggaagtcggaaaggttcctgagctgcttcttaaaaataagtatgggccaggcacagtggctcgcacctgtaatcccagcactttgggaggccgaggagggtggatcacctgaggtcaggagtttgagaccagccctgccaacatggcaaaaccccgtctctaccaaaaatacaaaaattagtcaggtgtggtgacaggtgcctgtaatcccagctacttgggaggctgaagcaaggagaatcacttgaacctgggaggcggaggttgcagtgagccgagatcgcgctgctgcactccagcctgggtgacagagtgagactctgtctcaaaaaaaaaaaaagtatgatcagttcttatgagtacagaaataaactcgcatttatggtcaattgcttttcaacaaatgtgccaagatgattcaatggggaaaagaaaaatctttccaacaaatggtgctaggacaactagatatccacatataaaagaaaaaaattggacccttttccaacactacacacaaaaattaactcaaaatagaccacagacctaaatgtaagagctaaaacaataaaaatcttagaagaaaatatagaaatatgtctttgggaacttgagttagttaaaatcttcttagatacgaaactaaaagcacaaagcagcaaaataaaataaataaagtgaatttcatcaaaattaaaaacttttgttcttcgatgaaaggcatccagaaagtaaagacacctctcaagataggagaaaatatttgcaaatcagatatctttttttttttttttttttttgagatagagtcttaccctattgcccaggccagagtgcagtggtgcaatctcagctcactgcaacctccacctccccggttcaagcgattctcctcagctgcctgtgtagctggaattacaatcatgcattaccacacttggctaatttttgtatctttagtagagatagggtttcctcacgttggccaggctggtctcgaattcctggcctcaggtgatccgcccgcctcagccttccaaagtgctgggattacaggcatgagccactgcacccggccgtgcaaatcatatatgttaaaagggatttatatttaaaatatctaaagaatcttaaaactcgataataaaagacaacctcattaaaacatagtaaagagaaggatgaaataaaatcatctttgtcacagatgacatgattatgtagaaaactggaaatgacaaaagaaacacttggaactaataagcaattatagcaagtgatgatagttgcagaatgcaaggttagtatacaaaagtcagccagttgcggtggcacgagcctgtagtcacagctacgcgggaggcagaggcaggaggatcacttgagcccaggaattcaaggctgcagtaggctccatggagtggctcatgcctgtaatcccagcactttgggagactgaggagcacagatcacttgagtccaggagtttgagaccaacctgggcaacatggtgaaatctcgtctctacaaaatatacaaaaattagctggatgtggtagtgcatgcctatagtcccagcttcttgggagactaaagcaggaggatcgcttgagcctgggaggcgaaggttgcagtgagctgagataacaccattgcattccagcctgggcaacagagtgggacccccatctcaaaaaaaaaaaaaaaaaaaaaaaaaagccaatgactttcctatatctcagtaatgaacaagtgagcaagactccatctcaaaaaaaaaaaagaaagaaagaaagaaagaaaaaaaagatagcaagcacaatttcatttacattaggcaccctccaaaatgattttttttttctcatgtggagtttcactcttgttgcccaggctggagtgcattggcatgatctcagctcactgcaacctctgcctcctgggctcaagcaattctcctgcctcagcctcccaagtagctgggattacaggcatgtgccacgacacctggctaatttcatatttttagtagagacggggtttcaccatgttggtcagatccacccgcctcagcctcccaaagtgcagggattacaggtgtgagccactgagcccggcctgaaatgcttttttacaagagcacaaatccacttttatttattgacttttcattagtttaaatccttgaggggtacagcatgagggtacagcatcacttggattctgtgtccaatagccttagcaggaagattgcttcggaatttggcacaagccatgccactgtttctgtgggccagagttacctttccccagattactctggttttgtttgattgccgccaggagtcactttgttgttctttgctttgtatacataagcacatctcttgcccaaatagaattctgtttcatctcgggcataaacaccgtcaattttaaggaaagttgtgtgctctctgttccggagaccctgcttatagccagcaaaaatggccttggaccacagcttccagacatattttcttttagaagtcttgttcccagcaggatccaagatggcaggaaaaaccaaaatgaaatattttgatataaatatatatattttttgagacagagtcttgctctgttgcccaggctggagtgcagtggtgcaatcttggctcactacaatctctgcctcctgggatcaaatgattcttctgcctcaaccacccgagtagctgggattacaggcacctgccaccacacctggctaatttttttttgtatttttagtacagacagggtttcaccatgttggtcaggctggtctccaacacctaacctcaagcaatccacccgccttggcctcccaaagtgctgggattacaggcatgaaccactgcacctggcctatattttgatttaaatctaacaaaatatgtttaagatctatgaggaaaactaaaaactctgattttaaaaaatcaaagaagaaccaaataaatagggagatattcaatgattgtgggtagaaaaactcaattatcaagacatcagttcttcacaacttgatttatagatttcaatacaatcccaatcgaaattccagcaaatgattatatggatatcaacaaactaattctatagccaacacaatactgaaggagaaggcaaagttagaagactgacaaggtcagaggactgatattacctgacttcaagacttactataaagctacagtaatcaaaacagtgtagtattgctgagaaaatagacaaatagatcaatggaaaagaatagagaccagaaagagccctggcagaaaagtagagggggagggtggtaggatggggaagggaagagggtggagaggagcgaagagtagggaggggaggtggaggacaggtagaagattgaaaatggatggagggatgatgcctggaatacaaaccaggatgtgttctagagcacttatggataggcttggagagaaggcaggactctttttcctttgagactagggagaaagatggagactgctggtaagacagagataatttgttcagaggcagggcaagaagttgagggaatccctgactgatgtaacatgttattcatccagcaaatgattattgggcaacatttatgtgtcaagccctaagcccagtgctagagattcagagatgaatgagataaagcgcttgctctctcagaacttagagtctggccaggcatggtggttcactcttgtaatcccagcactttgggagaccgaggcaggcagatcacttgaggtcaggagtttgagaccagcctggccaacatggtgaaaccttgcctctactaaaaatacaaaaaattagccaggcatgttggcatgcgcatgtaattccagctactcaggaggctgaggcaggagaatcgctaaaacccaggaggcagaggttgcagtgagcagagatcgtgccactgcattccagcctgggtaacagagcaaaactctgccaaaaataaaaaaaaacttagagtctagtggtctctacttccttttttcttttttcttttttttttttttgagaaggtctcactctgtcacccgggtggaagtgcagtggcataatctgggcttactgtagtgattctagttgcaggatataagacatcctggggctcaagtgattctcccaccttggcctctggagtagctgggactacaagcgccacaacacctggctattttttgtagagacaaggtctcactgtgttggccaggctgctctcgagcgatcttcctgggctcaagcgatcttcccgctgtggcttcccaaatgctgagactacaggcatgagccactgcacccggccctctactttctttatgaagtagaagataaagttttgctggaaggaggtgtgtgggagacttaggggacttgagtagagtggcgaatatttagaatactttttcaggaaatgagaaaccaaaaatgaataggaaaatgttgtaagaattgctgcttgccatggagtatccagatgagaacagatatgtttatggtagtatgaatccaaaaagcgatgttatttttttcctactaaatttctttcttgtttttttttgagacggagtctcgctctgtcgcccaggctggagtgcagtggcgcgatcttggctcactgcaagctctgactcccgggttcacaccattctactgcctcagcctcccaagtagctgggactacagacgcccaccaccgcgctcggctaactttttgtatttttagtagagacggggtttcactgtgttagccaggatggtcttgatctcctgacctcgtgatccgctcaccttggcctcccaaagtgctgggattacaggcgtgagccaccgcgcccagccttttcctactaaatttcagtagcccagatgaagtagcagaggagattgagggatagattcatctggaattggaagtttatgaggcagttgcaatagaaggacaaggaagagagagagttgacagtgctggcaaaagaagaattgagctgatcaattactggatgggacattagtctctttcagttggcaagaagcagagatacccttagttcaggttatcacaaagtctgaggtagaagataatggcactgaagtagaaggcaggaagcccaggaaacttgttccacagacaggcatcagggagaaacgaaaacatgcctagaataggatgcaatagatgttctagtctattgaatagaatttcaccctaatgtcagctctaatcatctggtttgcttctactctctcagaagtaaatgcccatttactcctttttccgggaattctcccatattcataactcagcttcttactgcctagtttctctctctcctcttctgcacatacttactacttctccctgtttgtattaatttttctgtgacttgcatccaaattcccccaaaagaggacttattgagtcagttaggttcatccaatatggaccacattaaagacttctggtcttcccttatgtttagcctataaatgtttatcttctgctattttatagatttctgatctaatcagccacaaccagggtaacacaatgatgatgctggaaaaaggtcccaacccagaccctaaaagaggggttcttggatctcatgcagaaaggaattcaaggcaagtcacagagtgcagcaagaagagataatttatagaaagctactcagttacagagtagggcatccttagaaagcaagcggaggaatgagcactgtctttgttttgttttgttttgtttttgagacagagtttcgctcctgttgcccaggctggagtgcaatgacgcgatctcagctcaccgtaacctccgcctcccgggttcaagcaattctcctgcttcagcctcctgagtagctgggattacaggcatgcgccaccatgcccggctaattttatatttttaatagagacagagtttctccatgttggtcaggctggtctcaaactcccgacctcaggtgatctgcccgcctcagcctcccaaactgctgggattacagatatgagctaccgcgccggccgctttgttttaaactcttcttatatagaggtcttatctatgtaaaagctaagctatgtctacatgcaggtaggctgacagcatgacaacatttattactttgttgatttaaagatagttatccttggcattttagtgcgtaagtacatcaaagcatgactataatcatcttaaaagcatatattgttatgtgatatcggggcatctggacattctgtggttgcaggagtttgtccttgcaggcattattaagctgctttcttagccgtaaacatcttgtgaccatgggtcatgaactggtgaggaatgtgccttgctagctttaagatggagtatattttaaaatggtgtcaaccttgctctctgatactcctgtttccctaacaattatataacatacagcatggccaccccagcctacttttctcagaaaggaattgtgagtagagcttcacagaccatggaggactccatcatagaaaaggaaagaaaagcaggagggggattgatggccaggtgtggtggtgtgtgcctgtagtctcagctaccccagaggcagaggtaggagaatcgcttacacctgggagctcgaggctgcagtgaaccctgatcacgccactgcacttcagcctgggtgatggagcaagactctgtctttaaaaatgtgtgtatatacatatatagctccataatcttaaagaacttgagtattaggagtggggaaatgaaagagctagaaggaacgataaggaatttcagattgttagaagagtgaagataatgggatggtataagccaaaaaatgttgaggacagaatcttaggtggctcatccacatgaataaagttacacaactcagaagatgacagatgccgggttgaaaaaaagccagattatcgaagtttgcaacaaatgtagaggcaagtcttggaagtcaatacaaaacaatgatcaggagagataaaaggtaagatgaggaaagcatggactgcaaaggaggatagtgtagtggttggaaatgcatctgaggaatgatgacataatctctcatccccaagatgcaggggacatgagggaatgcatagggaaacatgtatgttatgtaagacaaaattaatgcatagtgtatattaggaggtgcagtgatctataaagtaagtatataagacacagaaagtaccattctattgtttcacagcttttgtctgaaattagtgtatgtggtataagaaacattaaattggccaggcgcggtggctcacgcctgtaatcccagctctttgggaagccgaggtaggcggatcacctgaggtcgagagttcgagaccagcctgatcaacatggagaaaccccatctctactaaaaatacaaaaaaattagccgaggtggtggcgcatgcctgcaataccagctactcaggaggctgaggcaggagaatcacttgaacccgggaggcggaggttgcagtgagctgagatcacaccattgcactccagcctgggcaacaagagcgaaactccatcgcaaaaaaaaaaaaaaaagaaacattaaatttcaaaattaatgtttattttgctaatagtgttagagatgaggtaattaagcatcctcattttacagaaagcttcagaaggtttagtgatttccttaaggcatgcaggtgattaaggctgcccaggctggagtgcaatggcgcaatctcagctcaccgcaacctccatctcccgggttcaaggaattctcctgcttcagcctcctgagtagctgggattactagaatttagaagtattttttaagcaccttgacctcccaaagtgctgggattacaggcatgagccaccacgcccagcctagaatttagaaggattttatggggaggatgatattgttggcccagacctgttgaactgttaaagtgttaaagtttgatttgatttttttttttttttgagacagaatctcgctctgttgcccaggctggaatgcagtggcgcaatcttggctcactgcaacctccacctcccgggttcaagcccagatttttgtgcctcagcctcctgagtagctgggactacaggcaggtgccaccacgacaggctaatttttgtatttttagtagagatggggtttcgccatgttggccaggctggtctcacctggccaggctggtctgaccatgttggccaggctgatcctgacctcaggtgatccccccgccttggcttcccaaaatgctgggattacaggcatgagccactgcgcctgggcccctgtttgttgtttttttgttgtttgagacaaggtctcactctgtcgcacaggctggagggcactggcaccatcaaagcgcattgcaacctcaacctccctggttcaagtgatcctcagcctcccaagtatctgggactacaggcatgggccaccacacccagctcatttttcttttgtagtgatggggtctccctgtgttgctcaggctggtctaactcctggactcaagtgattttcctgccttggcctcccaaagtgctggtacaggtatgagctacagcacctagccctctttgttttcttctttttttgtttttttgagacagagttttgctcttgtcacccaggctggagtgcaatggcatgatctcggctcactgcaacctctgcctcccaggttcaagtgattctcctgcctcagcctcccaagtagctgggattacaggcgcccaccacaatgcccggctatttttttttctttttttgagatggagtcctattctatcacccagactggagtgcagtggcgtgatctcagctctctgcaacctctgccacctgggttcaagcaattctcctgcctcagcctcctgagtagctgagattacaggcacctgccaccgtgcccccctaatttttgtatttttagtagagatggggtttcaccatcttggccaggctggtcttgaactcctgacctcgtgatccacccgcctcagcctcccaaagttctgggattacaggtgtgagccaccgcaccctgccaatttttgttttttggttttttttttttttcagacggagtctcgttctgtcacccaggctggagtgcaatggcacgatctcagctcactgcaacctctgcctcccgggttcaagcgattctcctgcctcagcctcccaagtagctgggactccaagtgcctgccaccatgcccagctaattttttgtatttttagtaaagacggggtttcaccatgttagccaggatgatctcgatctcctgacctcatgatctgcccgcttcggcctcccaaagtgctgggattacaggtgtgagccaccatgccaggcccaatttttgtgtttttttagtagagatagggtttcgccatattgtccaggctggtctcaaactcctgacctcacatgtctgggaggcccgcctcagcctcccaatctttttttcttaataaacttccttgtaaaccagagtacagttttcaagaccagctccagctccactcctaatattctagttctgagtagctccagctactcaggagactgtggtgggaggatcccttgaggctatgattgcatcactgcactccagcctgggtgacagagtgagatcctatctctaaaaaataaaataaataaataaataaatttccttgtagcaaagagacacagtcaaaatcagtctaatgatcttcaagctgtttctaaaattaggagctccataaatattgtggttgatgattatggcatttctcccatggaaggcatattttaaagtaatggttgacgaaatacatctccctttctctttcactttcctcctctacacatgcaactcttggatgacaacttaagccaatcactatatctcgtattcctttaactcctctcactcccagattggttcaggaacaggaacgtaatcatatgacccaactaaggatattcaatgctaataagattaaatttttggaactttttccagctatcagggaaattgagtctcttttctactggatggaagtacatagcttcaggacctattagcagccagcttggcaccatgaaaggatagcctgcccagaaatggagtcatcaccaaggaagaagatgtcatttgaaccctggatcaagtttctttcaagaagaagcaagaaactgtttcactggcatatgagcaataataaagtcttttttgttgttgttgtttttgctgttaaatcagttctagttggattttctaccatttgtaacatacagtcctaactgatacagataagttctggtatacaaaaccatagtaaccatgtttctgttttttttttttttaagacggagtctcactctgtcacccaggctggagtgcagtggcgcaatttcagctcactgcaaactctacctcccagattcaagcgattctcctgcctcagcctcctgagtagctaggattataggcatgcaccaccacaccagctaatttttgtatttttagtagagacagggtttcaccatgttggccaggctggtttcgaactcctgacctcaagtcaggcccacctcggcctcccaaagtgctgggattacaggtgtaagccaccacacctggccataaccatgtttcttaatacaagtctgcattgcaactagctatatacaaagatacagttttaaactgtgatttttggaattcttgagactcttaacatgccatcactccacttcacactttattggaaaaccagcaaaaaaaaaaaaaaaaaaaaaaggccgtgtcttaaatacagatttataaaatctattcaaaaataatttcctcttaataaaatggaaatcactatatcccaaagtcaattcaatggttgcaacagataaaggatttctttccattttctatactttgctttcacccaaacttagattcaaatttaaacacagatgttttgagtgatacattaaaatactgcttcatatttgctaagatagatataaaatgaatctctgacttcccatatagtactgtgcttgttttatgcaaaaactggaaataaagaagtaaaaagtggttttaaaaaatgtgatataggtaggtcttaaataaacattgttaagctgagtagtaaaaaacagtaagtgtcataaaagggatatacacaaaatgtttttggaagcccagagaagggtaaagtaatgctggcacagccagagaggaagtgacatttgagctatgctaaaagattgggaaggaatttgccaggcagagaagaaaatagttacactatacaggaggaagacttatggcattttcttttttttttgttttttgttttgttttgttttgtttttgagacggagtcttgctctgttgcccaggctggagtgcagtggcgcaatcttgactcactgcaagctctgcctcccgggtttacgccattctcctgcctcagcctccagagtagctgggactacaggcgcctgccaccacgcctggctatttttttttttttttttaatttttagtagagacagggtttcaccatgttagccagggtagtcttgatctcctgacctcgtgatctgcccacctcggcctcccaaagtgctgggattacaggtgtgagccactgcgcctggccgaattatggcattttcaaagtctgttatgtagctaaacttttctctgtctgtcttaaaagctaagagctgaaaaattacctattattatttgggtctggggttgatgactgtgaaggcaatgtagaatatatagattggaagctgcaatgccttttatgacctagtctctgaactcaaataccatcacttctgctgtattctttgcattacaagcaagtcactaagcccagcccacactcaagaggagtgggattaaactcagtcacttaaagggaggagtatcaaagatttctgtggacatattttaaaaccacaacaaatatctagcgcactgttactccttgagggtaattttggacactcttttcttctctattaatcttttctttctttttttttttttttttttttttttttttgagatggactcttactctgttacccaggctggagtgcagtggcacaatctcagcttaacctcaacctccacttctctggttcaagccactctcctgcctcagcctcccaagtagctgggattacagacatgcaccaccaagcccagctaatttttttgtatttttagtagagacgaggtttcaccaggttggccaggctggtctcaaactcctgatctcaaatgatccaccctcctcggcctcccaaagtgctgggattacaggcataagccactgcgctcagcctgtttttttgttctttggtttgttttttgagacaaggtctcaatccatcagtggtgtgagccaccatgcccgcctatttatttatttatttgttttgagacgcagtcttgctctgtcacccaggctggagtgcagtggcataatctcggctcactgtaacctctgccttctgggttcaagcgattctcctgcctcagcctcccaagtagctcggattacaggcgaatgcgccaccacaccaggctaatttctgtacttttagtagagacaaggtttcactatgttggccaggctgatctcaaactcctgacctcaagtgatctgcccatctcagcctcccaaagtgctgggattacaggtgtgatccactgtgcctggccttctctattaatcttgattttcttccaagcctggtcttccgttagctttcccattcttagtaaatgacactacttccacttagttactaaaagccacagtcatccttgattcttttcttttcctcaatctccattccctaataaatccatcagcaaagataaagtatataccatgttccttggtatctgtgggggactaattccaggtaccccttggaaaccaaaatccatggatgctcaagtcctccatacaaaatggcatagtatttgcatatcgcctacacatatcctcccatatactttaaattatctctagagtacatataatacaatgtaaataattgttatttataagcactgtttacagagtaatgacaagaaaaaaaatgtctgtacgtgttcagtacagatgcaatcatccattaaaaaaaaatttccattcacagttagttgaatccagggatgcagaacccacagatatggagggccaactgtatatgtcatttgtttattccctcttctggccattaatccatgctaccatgaactcttgcttacttcagtggcttcataacttgtcttcttctacttttgcctccctactgtccatctccacacaccagccacctttttttttttttttttttttttcagagacagggtcctcctcttttgtccaggctgaaatacaatggcaaaatcatagctcactgcagcctcaaactcctaagcttaagtgatcctcccaccttagcctccagagtagctgggattacaggggcacaccactatgcctggctaattttaaaatttttaattcttattttaatttttatttatttatttgtttatttatttatttatttttgagacagggtctggctctgtcacccaggctagagtacagtggcattatctcggctcactgcaacctccgcctcccggattcaagcaatcctcccacctcagcctcctaagtaactgggactacaggcgcataccaccacacctggctaatttttgtatttttttgtaaagaaggagtttcaccatgttggccaggctggtctctaactcctaagctcaagaaatctgcccacctcagactcccaaagtgctggaattacaggcatgaaccaccacacctggcctaatttttaaattttttgtacagatgagatctcactatgttgctgatcataggtgtgagcaccagtctagactggccagtcagcgtttttgtttgtttgtttgttttaagacagactctcactcattgcccggactgaagtgcaatggtaaaatcatagctcattacagcctcaaattcctaagataaagtgatcttcctaccttagcctcccaagtagctgagactacaagtgcatgctaccacacctggctaatttttttttgtagagacagggtttcttcatgttacccaggctgtccttgaactcctgcgttcaagtgatctgcttaccttggcctcccaaagtcctgggattacaagcataagccaccacatctggcccagccagccaccttttattaagcatgtactttgtgctttgcagaacaataagtaatttacatgtatcatctaatttaatcatcacacctgtctaagaaatagttattactatttaacacccttgcttaaaaacctattttcactattataaagataacgcgtcttcacaaatatatttttccctctcctgttaaattacttttcttaggataaattttaggaagcagaattactaggttaaagaatataaagattttaaagccaccaataactctttttctattcttacttggaggacttgtcagttctctttctttatatttaattttttacggtggtggggggtggtcctccattttctgatgtcctgtccatgagtagatacatgttcctggaaaatagtctagaatagtagttctcaagttcaactgcacattacaattacctagggagctgttaaaaatatcaatgccaaggactctagatattctgacttaattagtctaggggagcatgagcatggactttttttttttttttttttttgaggcagagtctcactctgtcgcccaggctggagtgcaatggtgccatcttggttcactgcaacctctgtcttaaaaatgtccatgcttggccaggtgcggtggctcacacttgtaatctcagcactttgggaggccgatgcaggcagatcacttgaagttaggagtttgagaccagcttggccaacacggtgaaaccccgttccactaaaagtacaaaaattagctggtcgtggtggcggctgcctgtaatcccagctacttgggaggctgaggcaggagaattgcttgaacccacgaggtggaggttgcagtgagctgagattgcgccattgcactccagcctgggcgacaagagcaaaactctgtcaaaaaaaaaaaaaaagaatatccttgatgaaatagaaaaaaaatattggttttattagatccctcagaacatgtttttaattatttggtatgacaagctatgtatgcatgaagcacttctgttgcatatcaaagaatgattggtggttgtcttgaggaaaaccgtttctctaattcattgagctatgagctgacctttttcattgaccactatttttacctgaaaaaacgactaacagacaaactatggctatcaaaacttgggtatttggctgaaatttccccataatgaagaaagtgagcttgcatgtcaagaaaaataactgataaactgatattgtttcttgccaatgacaaaatttgagttttcaaacaaaaattagaattttggaaaacttatatctactaccatgagcttgacagtgtcccaatacttaaagattttcctgatgataataaatgtgtttttttttggggggggggacatcatataatgaaatgtgtcaacatttggaagatatgcatatctcaaggaattaatatttttcaaatgactagggcatatattaaatcatgcatgggtaaaagatccattcaaagagaaagacagaccagtggattttattttattttattttatttatttatttttttgagatggactttcgctcttgttgtccaggctggagtgcaatggcaaggtctcagctcactgcaacctctgcctcctgggttcaagcaattctcctgcctcagcctcccgagtagttgggattacaggtgctcaccaccatgcctggctaatttttgtatttttttcagtagagacaggggttttaccacgttgcccaggctggtctcgaacttttgacctcaagtgatctgcccaccttggcctcccaaagtgctagcactataggtgtgagccactgcacccagtcctaatggattttaatgaaacagaggacaaaaagttcatttaataatgtttcagattctacattgcaaataacttttttttttttttctttaaagacatcagatctcactgtgttgcctaggctggactcaaactcctgggctgaattaatcctcccacctcagcctcctgagtagctggtactataaacccgcaccactgtgcctggctgcaaccaacctttaagaaattaccatttgttggccgggtgtggtggctcatgcctgtaatcccagaacttcaggaggctgaggcaggtggatcacaaggtcaggagttcaagacaagcctggccaacatggtgaaaccccgtctctactaaaaatacaaaaaaattagccgggcgtgatggggcacacctgtaatcccagctacacgggaggctaagagaggagaatcacttgaacctgggaggtggaggttgcagtaagccgagattgtgccactgcactccagcctgggacagggtgaaactccgtctcaaaaatgaaaagaaattacagcttgttgcatttccatgtactatcaaagaataaccacaatggtcagaaaaaaactatctaaaaacttcttccagctacatatctgtgtgaagccagattttcttcatatccttcaactaaaacaacatattgcaacagactgaatgcagatgcatacatgagaatctattagctaaagctgacgttaaagaaatttgtaaaaatgtaaaacattgacacccttctcattatattttttgttttggaaaatataactgtttttcataaaaatatttatgttaatgtacaataagtttgctgttatttagttttaaattctagtacagtaattgataatacacatattccacataaacgaaagctcattagtttttaagacttcttggtttgagaactactactcaaaattttttgtttgttttgagagagggtctctgttgctcagactggagtgcaatggcacaatcatagctcctgactataaactgaacctcctgggcaatcctcccatctcagcctcctgagtggctgggactacaacacctagctatttttttttttttaattatttttagtagagataaggtctcgctatgttgtccgggctagtctcgaactcctgagctcaagtgatccttctgcctcagcctcccaaagtgctaggattacaggtatgagccactgggtcccgcctagaagttttactaaattttagaggcctaaaatctgaaatagttaagaaccacagacctttgaaaaggaatagacgaactgattgcatattctcagttaaaagcttttgaaaagtatgaaatggcaatgagttctagattctattcctgataagaacttgccaacagctctgatatgccaattaactgctgacccttaatattaatgggttttaaacaacgcttagatgttcaaatcccaattccttaatatgatatacaaagcatcctgtataaactgtgctttccaagaattaactgatttaatttgtgacaactctatgtagtaggtactgttaccatgtatgatttgtacattctgttcaacaaatgaatgaatacaatgagtaaataaaattaagaattttttttttttttgacagagtcttgcactgttgcccagactggagtgcagtggtgcgatctcggctcactgcaagctccgcctcctgggttcacgccattctcctgcctcagcctcccaagtagctaggactacaggtgtccaccaccacgcctggctaattttttctttttttgtatttttagtagagacggggtttcaccgtgttagccaggatggtctcgatctcctgatctcgtgatccgcctgcctcggcctcccaaagtgctgggatcacaggtgtgagccactgcgcccggccaaaattaagtaatttttatttttatttttttgagacggagtctcgctctgtcgcccaggctgtagtgcagggcacgatctcggctcgctgcaggctccgcctcctgaattcaagtgattctcctgcttcagcctcctgaatagctgggattacaagtgcgcaccaccatgcctggctaatttttgtactttttagtagagatagggtttcaccatgttggtcaggctggtctcaaactcctgacttcgtgatccgccagcctcagcctcccaaagtgctgggattacaggcatcaacatgcccggcctaagtaactttttttttttttttttgagactgagtcttgctctgtcgcccaggctggagtgcagtggtgcaatcttggctcactgcaagctccgcctcccgggttcacggcattctcctgcctcagcctcccaagtagctgggactacaggcgtccaccaccatgcccggctaattttttctttttttgtatttttagtaaagacggggtttcaccatgttagccaggatggtcttgatctcctgaccttgtgatccgcctgcctcagcctcccaaagtgctgggattacaggcatgagccactgcgcctggctagtaattttaaaatctagatccaagtccagtttagaaaagagaagcattctcaactccagctctgttcattcaattaatgatcacttcctgtctttttcctcattatttgcctatctgcagttttcttctgtgtttttactgccacctgcctcttctctgtttcatctcttcaaaagtctcactgttaattcctttctttcttgggattttagatccctctaaatctgcatgcaccttttgaaaacaaatacgaacatcacaatctttaccaactagtctcataagagctaaccttcatggagtaatcactatgtgatacattctttactgcatgaccttacttagtcttcattgtactacggtactatttttatcatccctattttacagggatgggacaacagaggttaacagaactaaaataacttggccaaatctcacagctagatagtggtagagccaggatttgatttaaacctgtgtcttttcctcctacagctttaattagaaataatttatgcattataaaattcacctgttataagtgtacagttcaatgcttagtaaatttatagagttgtgcaactatcaccacaattcagtttttagaatattttcctcaccccaaaaagttcccttgtgctcatttgcagtcaattcctgctcccaaccctagccccagacaactactaatcagctttctgtctctatagagttgccttttgtggaacttacataaatggaatcctacattgcatgtaaatagaatctttgtgtctggcttttttcatttagcatgatgtttttgaagttcatccatgttgtatagtgtgtcagtcattcattccttcttatggctgaacaatattctgttgtacaaatatactgtgttttgttccattcaccatttgggtcgtttccactttttggctattatgaataatgctgttgtgaacattcacatacaagcttctgtgtggtcatatattttcatttctcttgagcagtacctaggagtgaaattgctgagtcatagagtaagtttatgttgaacttttttttttttcgagatggagtctcactctatcgcccaggctagagtgcagtggcgcaatctcggctcactgcaacctctgcctcctgggttcaagcaattctcctgcctcagcctcccaagtagctgggactacaggtgcgtgccaccgggcccggctaattttttgtatttttagtagagatgggatttcactgtgttagccaggatggtctcgatctcctgacctcgtgatctgcccgcctcagcctcccaaagtgctgggattagaggcttgagccaccactcctggcctatgttgaacttttaaagaaactccaaaactattttccaaagtggcagtatcattttatattcccactaacaatgcatgaaggttctaatttctccataacctcatacacatttggcattgtcggtctttttaattataaccattctagtgaatgtgaagtggtatctctgtggtttcagttggcatttccctaatgactaatgctgttgaatatcttctactacatttgttagccatccatatatcttctttggtgagaactcatgactacaaagtaaatgccactcaaccaatgtttcccaaacatgccatacacattcttgcctctctgctttttatttatttatttttttgagacagggtctccctgtatcacccaggctggagtgctgtggtgccatcacagctcaccgcagcctcaacctcctcgagcaatcctcccacctcagactcccaagtagctgggactccaggtgcccgccatcaaggctggctaatttttgtgttttttgtagagacggggtttcaccatgttgcccaggctggtttaaactcctaagctcaggcaaactgcctgccttggcctcccaaaaggagacctcccaaagtgctgagattacagacatgagccgtcgtgcctggccacctctctgcttttaagtatactcttcttctaatctaaaatgccctgttattttatgatccaaatttaccatttcaaaaaatttatcggccaggcatggtggctcatgcctgtaatcccagcgctttagaagcccaagatgggtggatcacctgaggtcaggagttcaagaccagcctggccaacatggtgaaaccccgtctgtattaaaaatacaaaaaattagccaggagtggtggcgcatgcctgtaatcccagctactcgggaggctgagacaggagaattgcttgaacccaggaggcagaggttgcagtgagctgagatcgtgccattgcactccagcctgggtgacagagcgagacttcctctcaaaaaaaaaaaaaaaaaaaaaaaaaaaatatatatatatatatatataaactagccaggcgaggtggtgggcgtctataatcccagctactcaagaggctgaggcaggagaatcatttgaacccaggaggcagaggttgcagtgagctgagatcactccactgcactccagcctgggcaacagagtgaaactgtctcaaaaaaaaaaaaaaagtaaggccaggcgcggtggctcatgcctgtaatcccagcactttgggaggccgaggtggacaaatcaccggaggtcaggagttcatgacgaggtggccaacatggtgaaaccccgtctctacaaaaatacaaaaattagctgtgtgtaatcccagttactagggaggctgaggtgggagaactgcttgaacctgggaggcagaggctgcagtgagccgagatcgtgccactgtactccagcctgggcaacagagcgagactgtctcaaaaaaaaaaaaaattacccacagattctcatctcctgtaagagtaatgttggtccaaccctttacacttcctatctgtcacagtattctcatacagcaataagacaataaatgttaagtttatgaatggactttgacctggttaaaacatacaaattctattccatttctgagcagaacagatcctcaatatatatttcttgaaaatgggtactatagaagatacaaagacaaataaagcaaaataaaatataaaaatgttttattggctgggtgcggtggcttatgcctgtaatcccagcacttcaggaggctgaggtgggtggatcacaaggtcaggagttcaaaaccagcctggccaagatggtgaaaccctgtctctgctaaaactacaaaaattagccaggcatggtggcaggtgcctgtaacctagctacttgggaggctgaggcaggagaatcgtttgaacctgggcggcagaggttgcagtgagccaagatcgcgccactgcactccagcctgggtgacagagcgagactctgtctcaaaaaaaaaaaaagttttatcatctaatacgatgcacagatatgggtcctgctgtggtttgaatgtgttccccaaggaatacatgttggaaacaatccccaacgccaacagtgttgggaggtagggcctaatgggaggtgtttaggtcatgaggatggagccctcatgaatgtgttaatataatatccaattaaaaagggcttaaggctgtgagttctatggcctgcactcaccctttgcctttcacctgccaagggatgacacagaaagaaggccctcatcagatgtgggtccctagaacttaaccttcccagcctccagaaataaatttcttttctttgtaaattacccactctgtggtattctgttataacaacacaaaacagactaagacaggcccaaatgatgcaaaagtatgtcctctgcaattgtactaccacttcaggcctaaataagacccaaaggcctagtatccatatatctgttaatttgtttaacaatgatttattaagcatctttaatgtatttgccactgtgtaattgctattgttagagggagaatagaagtaatagatattatctttctatttgttcatagaaagatgaagagaagtgacaggtaatcaaataattttaatacaatgataagtgcaataataaagatagctccagccaggcgcggtggctcacacctgtagttccagcactttgggaggcctaggcgggcggatcatgaggtcaagagatcaagactatcctggccaacatggtgaaaccccatctgtactaaaaaaacaaaaaaattagccaggcgtggtggcccgcgcctgtagtcccagctactcaggaggctgaggcaggagaatcacttgaacccaggaggcagaggttgcagtgagctgagatcgcgccactgcactccagcctggtgacagagcaagacttcatctcaaataaataaataaataaataaaggtagctccacctgtaggactgcacatgttatcacagtgtcacaaaagaaatgactttgatttggttctttaagaaagaatattagccaaatgaaacatagggcttcctggtgtcattctggcccagctctgggtttttccctcaccacaaactgtcaaaaagcctgatccaattttgtatcagtaaaataatcaagacatttgaaaaagtgctggactgatctgggttcctggggttattgggataatgtcaacaacagcacttccccccacatttccccttttctggactcatttctaggtatcatcctgagtttttaagacacttaaatagttttagaaatcaacaagggtagtctgggtgcagtggctcatcctgtaatcctagcaatttggggggctgagaccagaggatagcttgaactcaggaattcgagaccagcctgggcaacatagcaagacctcatttctactaaaaaccaaaagaactaacttggcatagtggcacatgcatgtagtcccagctcttcaggaggctgaggtgggaggatcacttgggcccaggtgatggaggctacatgagctatgatcatgccactgcactctagcctgggcaacagagcaagaacctgtttcaatacaaaacaaaacaaaaaagcacaacacacaacaacaaccaaaaaaaaaaaaaaaaggaaagaaaaaagaaatcaataagggtaggaggacttgaggactagataaaaaatgaacctcttgaaaaagactgtctttagcagtctgatctctccaagcctggaggagagcccaagagatggaggtgagccaaagagctggaggctctttattgtaaatagggttagttgtttccaggtaaaccattaggtttttagatccccaaattctgcccattggtattgctcagttgttgtttggttttagcccatacggccttttatttaaacctcccttggagggcttaatctggaaagcaaaaagggatgatggccaaggaaacagggaaaatatggaatagtaatatttgtcctgggcatcactattctgaataacaggaagttatttctgcggccatcaacctgttgtaatgaaagacattcaaatttcagtcataatttgaatactgacgctgaaaccttgttcaaactattcaacactattaaatcagaagctctttaacagaaaaataatctacctttaattctttggtgaaaattaaaagaaagtatgtagcgacccctcattatcagtttgacaatggtgatgataatactaatacttctactactcacttacacttatagagcgttgtctatgcaccaggcagtgtttcagagtgctttgtatgataatgatgatttgttgaatttctaagtctcagtttctgatatttatatcggctctccactatgcctgtatgaaagaccagtatattgcggatcacttgtggacaggagttccagatcagcctggccaacatggtgaaaccccgtctctactaaaaattcaaaagaattagctggaaattgcttgaacctgggaggcagaggttgcagcgagccgagatcgcgccattgcactccagcctgggcaacagagcgagactccatctcaaaaaaagaaaaaagaaaaaagggccaggcgcagtggctcacgcctgtaatcccagcactttgggaggtcgcggcggacggatcacctgagattgggagttccagaccagcctggccaacatggcaaaactccatctctactaaaagtacaaaaattagccgggccatggtggtgggcacctgtaatcccagctactcaggaggctgaggcaggagaatcgcttgaacccaggaggtggaggtttgcagtgagccgagatcgcgccactgagctccagcctgggagaaaagagcgagactccgtctcaaaaaaaaaagcaaagcaaagcaaaaaagaaagaccagtgtgttgctgtttgtcttaggcagcttgaggtgctgtaacaaaataccatagactaagtggcttagacaacagattttggccgggcgcagtgactcacgcctgtaatcccagcactttgggaggccaaggcgggtgaatcacctgaggtcaggagttcaagagcagcctgaccaatatggtgaaaccccatctctactaaaaatacaaaaattagccaggcttggtggcaggcacctgtagtcccagctactcaggaggctgagacaggagaattgcttgaacccgggaggcaggggttgcagtgagatgagatcacaccattgcactccagcctgggtgagagagcaagactctgtctcaaaaaacaaaaacaaaaacaaaacagatttatttctcaaagttctggaggctgggaagtcccagatcacagggtcagcatgatcaggttcttggtaagggcctttgccctggcttgcagatggccaacttccagctgtgtcctcacattgtgggagagagagacacacacacacacacagaggtctggtctcttcctccctatcaggacactaatctcaatacggggctttactctcaagacctcatctaaatctaattacctcccaaggtctcacccccaaaacccaccacattaggggttagggcttcaacatatgagtttaagaggggcatattatgtccataacgtcattctaagaactgcttctccaacctggctgcacattttatcattcagggaggcttctaaaaaataccgattcctatatgctaaaccaattaactcagaatatctggaagtagagcctagctcctctttgtagattgaacgagagttagaaaagggtaactaaggccaagtgcggtggctcacacccataatcccagcactttaggaggctgaggcgggcggatcacctgaggtccggagttctagaccagcctggccagcatggtgaaacacagtctctactaaaaatacaaaattagccgggaatggtggcgcatgcctgtaattccaggtactcgggaggctgagacaggacaatcgcttgaacccgggaggtggaggttgcagtgagccgagatcgcaccactgcactccaccctgggcgacagaatgagactttgtctcagaaaaaaaaaaaaaagaaagaaagaaagaacagagtagctcacattcacattttccctaagtaaggagcatccgactttttttcttaaagccttagtggtcagcccaaggagtcctgatttcactcaattttcactcaatttctgggtttctgtttttccatgtgggaagagaagcttctttgaggatttctatgttttgttttaagaccaggttttgttttgtcacccaggctggagtgcagtggcatgatcagggctcactgtagcctcagcctccagggctcaggtgatccccctacctcagcctcccaagtagttgcaacaccacgctggctaatttttgtaatttttttttagatggggtttcgtcatgagttcaggttggtcttaaactcctgggctcaagtgagctgccccgccttggcctcccaaagtactgggattacaggcatgagccaccgtgcctggcccattgcttttttttttcttttttttttttgagacagagtctcactctgttgcccagcctagagtgcagtggtgcgatctcagttcactgcaacctctgcctcccgggttcaagtgattctccggccttagcctcctgagtagctgggaatacaggcgtgtgccaccacgactggctgatttttgtattttttagtagagacggggtttcaccatattggccaggctggtcttgaactcctgaccttgtgatccgcccgcctcggcctcccaaagtgctgggattatgggcatgagccaccgcacccggacacctggccgatttctatggtttttaaagaaaagatgtttctgaggcatgattaacacagtatttgccttttctctttttattttatttatttatttatttttttgagatggagtctcgctctgtcacccaagctggagtgcagtggcacgatctcggctcactgcaaactctgcctcccagggttcacaccattctcctgcctcagcctccctcctgaatagctgggacttacatgcgcctgccaccaggccggctatttttttgtatttttagtagagacggggtttcaccgtgttatccaggatgatctcaatctcctgaccttgtgatccgcccacctcagcctcccaaagtgctgggattacaggtgtgaaccaccacacctggccttttcagtatttgccttttctcagagtcctatcaggtctcttattgttagtttctgggataacttgtgtttttcttttaaagatactctgccctggatttactaatttgcttactatatattgactgcattccatgcatcaagagctgtactgagtggtggggatttaaagaagataacaaatctcttatccctaaagaattcactccttggggtaagagactcacacaaataacacataaaaaatgtgaaaagttaatgtaaaagtattgtgaaaggctctgggaaggaaacagttaattgtggactatcagggaaaactaaaaagggaatgcgcttgccctttgagttgagctttaaggacaacatgacaatatgggatgggaagtagacgggggcatttctgggagaggaatagtgcgaacagtgggttggaggtgtgacggaatgttaagtggtccagtttaactcaaattcagggcatttaaggagattatagaaaatgagaatagtggcccgatgcggtggctcactcctgtaatcccagcactttgggaggtcaaggcggccagatcacctgaggccaggagttcgagaccaacatggtgaaaacccatctctactaaaaatacaaaaaattagctgggtgtggtggcgggcaactgtaatctcagctactctggaggctgaggaaggagaatcacttgaacctgggaggcgaaggttgcagtaagccaagatcgcaccattgcactccagcctgggcaacaaaagcgaaactctgtctcagaaaaaaaaaaaaaagagaataagatagtaatttctatcctattttaaggaggtaaagattagaggaggaagtttgaagagagtggtatagctttgaaacagccattttgcagaatgaaaaagggagttcactaggaataatgacatcagctactatttatgagtgcttactatgtgctaggcattctgctaggttcaccatatatcttgatgaactaagcagccatggtccttgttctcatatggagcctacaatctagtaggggagatagaaaacaaataggtatattctttttggggtgtgtagggggacagggtctcattctgtcacccagatagagtatagcggtatgatcactgcttatggcagccttgacctccagggctcaagtgatcctcctgcctcagcctcccaagtagctgggaccacagatggaagcccccatgccttgctaattttttatttacttatttatttttttgagatggagtttcgctcttgttgcccaggctggagtgcaatggcgcgatctcggctcacagcaacctctgcctcccaggttcaagcgattctcctgcctcagcctccctagtagctgggattacaggcatgtgccaccacacccagctaattttgtacttttagtagagacagggtttctactaaacctgttgttcaggctggttgcgaactccccacctcaggtgattagcctgccttggcctcccaaagtgctgggcttataggcgtgagtcactgctcctggcctgctaatttatttttatattttgtagagagacgggtctccctattttgcccaggctggttttaaactcctcttgttttttcagacagggtctcactgcgtcacccgggctggagtgcagtggcgtgatctggctcactgcagcctcaacctcttgggctcaagcaatcctcccacctcagcctcccaagtagctagaactacagacatgcaccaccacatccagctaattttgtttattttttgtagagacaaagtctcactatgttgcccaggctggtttccaactcctcaactcgagtgattctcccaccttgtcctcccaaagtgctaggattacagaggtgagccaccttgcccggcctagattagtatttttttacataggtctggagactatgggccagccgcggcaactcacacctgtaatcccagtgctttgggaggccgaggcgggcagatcacctgaagtcaggagttcaagaccagcctggccaacatggagaaactccatctctactaaaaatacaaaaattagcccggcgtagtggtgggtgcctgtaatcccagatactcaggaggctgaggcagggagaattgcttgaacccgggaggtggaggttgcagtgagctgagatcacgtcactgcatccagcctgggagacaaagcaagaaaaaaaaagaggagacctatggagttttgaaataataagatattgaataaaatggcattcattgggcaattgtctcttatacaaaatgcctaagtagggtctctataaaaaactgtaattaaaggggagtgaaaacaaaccctttgcttacagtttcagtgggtttaatgaaaatttatttatatggatgagccagtccaccccacatgcaatttgtatttaatgtatttggatttagagttcttgcaaacaaattcaaaaacactagaatagattcattgtgtctcctcttttctataggagaggcagtacaacctaattgttaaattgagggcattaacattagacagacctggttttgattcttgctcagccacttcctagccctgggaccttaggcaagttattcaacctctctaggcctagttttctcattagtgctgtgcagataacaaaagaacctatttcaaaggactgtgttgtaaatattaaatgaaaaattaaagcatttagcccagtgcctggaaggcagtcactgacacattccattgcagaaagacataatagaaacaatataatatcaaacacttattatgccagctactgtgctaagtactttaaattcattatttcatttaatcctttgagataggtattatttcttattcgcatttcacttgaggaaagggtggtttaaggaatttcagtaatcagagaactataaaaacatccagttagcacaatcaccctcaggtgtgcacgtgtaatttgatgcaaacatatgcatgcatacaaatgcaagaatatttacatactcattattgcctgtaccatgtttcctggcacttccacctggattgatggtgctgtaataacatagtggcattagtggaactggctggaagagcacccactcaaccagaatgggtgttttattggaaagagtgatgcattgcaaaaggcccaactctgtctctaccttgccctcagaccttgaataagtcatttgactaaatctttgggcctcagtttcctcatctgtaaaataagggggctggctcaggtctactctaatcagctctgaatcaaaagcagccctcaatcctgccaccttgtataggcagttctatacaaacacactcgcccccatggcaacggccactcagctctcagaagcactggtatgccgctctactccagccaacagtactatttccatcgcaaattcctgggtgaatagagggcttggatgggggagggatctgttcatcagtaatcttaaagcccctggcattaaaagaaagtctagaataaattgtctgtgggtggtgcatatgtgctaaatcagaaacagcatcagcatttaattcacaatattatccttctaggaggtggaggagctatcttagctgaggtgaaatttagagggtcactttgccactgaagtgctgagtcaatgagtggaggaaactgtgacccaagttatttaaaattggggaggatgccaaaagaacattgccagagggtgtttaaatcaatctggatttttgagaagcaattccagtgtttatttccaagctacatagatagactctcttattatcttatcacagcagacacttatcagaacttcatcttggaagcacagaggctgtagggcaaatggactgagaataaagatgcaagaaaaagagaacatctcttttcaaaaaaaggaggagatatccttgagaaggctgccctatatctgctctaccctctattttcaagccttcaccaagttgtttctagagtctgttgctgataatggtgaaatggtgacgatgacaatgatgaattcatggcaaggattagctcttgccttttcttcctccacattgcatagatttgagccaaagggggcactattcttttataactcagatgaaaaggaagtagatgctcacttaagatagagtttgaattgcctttctcacaaggagtggttccaggagaaatgtaataggcactacactaggtttccagctgagggcagccgtgttagcctttgctgactccttacggctgcctactgagagatctgcagaggaaaggcactgaaaacaggcaaacaatgtgaaggtggactgggagtttagaaatcaggctggtgagagtttccagaagaaggctgtctgtagttagagaccgacctgtgtccatgagctgggggaatcccggaatgaatggatggtctttgctgaggattgtatgagcagcaaaactttctgagctatgacgtgcagggcaaatcaaagctggctgctccttacaaacctgtggagttggacttgctgtttttcctcttgccactagagggtagaatatgaaaagaagattagcatgttttcatccttgcctagttagccctgtaggaattctaagtgttaaaggataagaaatcttgatcttgctaacacatatatctgtccaagctatttcctggcttacacatgttcaatggctccctaaagtttccagaataaagtctgagttgatgagaatggcatacaagctcttcccaaattcgccttggtcttccctcataactctgcccttcagtcccctgctcttcatctacaatacaaatccttggggaagtagtgtggtagaaggaacataggtgtcggagacaactggaagtcagttaatcatcccagaccacttattttccatcagtaccacatgcaactcaccactaattcctgtctattctatctcttagagaaactctttgagggcagggaccatgtctactttgctcaaatttgtatctttttttttttttttgagacagagtctcgctctgtcacccaggctgcaatgtgcagtggtgcaatctcggctcactgtaacctccgcctcccgggttcacgccattctcctgcctcagccttccgagtagctgggactacaggcgcctgtcacctcgcccggctaattttttttatttttagtagagatgaggtttcaccatgttagccacgatagtctcaatctcctgacctcgtgatccatgcaccttggcctcccaaagtgctgggattacaggtgtgagccactgtgcccagcctcaaatttgtatctttactgcctagcactcttcatgggagctcattcaatatttattgatcaaaataataaatgaatgattacatccatagcactgttgtcctcctagtccaagttaataccatctctcacctggtctgcagtggggtcccaagtggtctccctacgtctccttttgctcattacaatccattttatactctgcagcaagaatgatctttcccaaatgcaattttgctttaaaacccttcaatggcttcccattgctcttaaaataaataccgttatattctgaatatgacccacaaagtaaatataatttcatttattagcagtttggccacttgctagttatgtgattattagtaaattagtaaatctcactgagttttggtttcctcatcttaaaaatgtaaacaataggccgggcacagtggctcacacctgtaatcccactttgggaggccgaggcaggcagatcatttgaggtcaggagttggagaccagcctggccaacatggtgaaaccccatctctagtaaaaatacagaaaattagctgggcgtggtgacaggtgcctgtaatcccagctactagggaggctgaggcaggagaatcacttgaacttgggagatagaggttgcagtgagccgagattgtgccactgcactccagcctgggtgacagagcgagactacatctcaaaaaaaaaaaaaaaaagaggaccggcacggtggctggcgcctgtaatcctagcactttgtgaggctgaggcaggtggatcacctgagctcaggaatttgagaccagcctgggcaacagggtgaaaccctgtctgtactaaaaatacaaaaaaagaaaaaaaaaatcggctgggcatggtggcacatgtctgtattcccagctactggggaggctgaagcagaagaatcacttgaacccaggaggtggaggttacagtgagccgagattgtgccattgcacttcagcctgggcgacagagcaagacttcatctcaaaatatatatatatgaacaataattattcctacctcatagaattgttgagaaggttaaataaactaatacatacaaaataatgagcacagtgttccgttctgtgttcagtaaatggtaactacagtttttagcacctgaatgacatagtccctgtatatctcttgctattccccctcattttctggcagtctcattaagtttctttcagatcctggaatcccatgctcttttttttttttttttttttggtccaggctggagtgcaatggcaatggcgcgatcttggcttactgcaacttccatctcccaggttcaagcgattctcctgtctcagcctcccaagtagctgggattacagtagcccgctaccacgcccagctaatttttttttttttttttgagatggagtttcactcttgttgcccaggctggggtgcaatggcgcgatctcagcttactgcaacttctgcctcctgggttcaagcaattctcctgcctcagcctcctgagtagctgggattacaagcatgtgccagcaagcccacctaattttttgttttgttttgttttgttttgttttgttttgttttttgagacggagtctccctctgtcactcaggctaaagtgcagtggtgtgatctcggctcactgccacctctgcctcccaggttcaagcaattctcctgcctcagcctcctgagtagctgggattactcagctactcagcacgtgccaccacgcccagctaatttttgtatttttagtagaaacggggtttcaacatgttggttaggctggtctcgaactcctcccctcgtgatccacctgcctcggcctcccaaagtgctgggattacaggtgtgagccaccgcgcccccagctaactttttgtatttttagtagagaaggggtttcactatgttggccaggctggtctcaaactcctgacctcaggtgatccgcccaccttggcctcccaaagtgctgggattataggcgtgagccaccgcacccagcctgccatgctcctttttattcctacttctctatctggtcccatgtggagtttccttcctctaagaagcctttcttgacatcccatgtcttgttcggatggccctgcaatgggctcccatggcatcctaacactcctcaaagcatttgttatctattccttacatagtgactgacatttagcaatccttcagtaaatatctgttgaatcaactccagacactgcatttctctttcccatgctctttgtacatgttgtttcttatttcttttctagacagaacatcatgactgctacatccacatttccttcccaagggaaactttcccacccacagcctctgttgaagagacagcctctaggtagccatagttatgtcccttttgccttagctgactggaccagaattggcatctgacgcaatggtggataatccaggacctggctagcaatttccaacatatctggcaattaaaaaggagtaggttgatcagacactgtctctctttttaaaaacttattattttttaaaaatatgtgaaatggggtctcacggttttgcccagcttggtctcgaacccctgggctcaagggatcctccccaccttggcctcccaaagtgctgggattacagatgtgagccactgcgcctggcccagattctctttatttattttatttttattttattttattttttttgagacggagtcttgctctgacacccaggctggagtgcagtgacgcaatctcggctcactgcaacctctgcctcccaagttcaagcgagtctcctgcctcagcctcctgaatagctgggattacaggtgcgtgccaccatgcctggctaatttttgtagttttagtagagacagggtttcactatggtggtcaggctgatctcgaactactgacctcgtgattcacccccctcagcctcccaaagtgctaggattacaggtgtgagccaccgcgtctggcctatttatttatttatttattttgagacagcgtttcgctcttgtcacccaggctggagtgcaatggcacgatctcggctcactgcaacctttgcctcctgggttcaagcaattctcctgcctcagcctcccaagtagatgggattacaggcacctgccaccacacccagctaatttttgcatttttagtagagatggggtttcaccatgttagctaggctggtctcaaagccctgagctcaggcaatcccccggctttggcctcccaaagtgctgggattacaggcatgagccactgcacccagcctctcttaatgtttaaattttgagttagcaaaaggagagaatgagccttttttttctttttctttctttttttttcaaacagtgtctcactccatcactcaagctggagtgcagtggcacaatcttggctcactacaacctcctctgcctcccaggttcaagcaattctcctgcctcagcctcccatgtagctgggattacaggcacctgctaccacgcccagctaatttttgtatttttagtagaaatggggtttcaccatgtttgccaggctggtctacgaactcctgaccttaagtgattcacccacctcggcctcccaaagtgctgggattacaggcatgagccaccgaacccagcccgaggatgcagcttcgaatgataagaacacaagctgaaatgatacctaaagaaaagctattaatattaagataaattcagagccatgaggaatcaaggaaacctacaaggaagtagaaactatgaggtagagaacattcatctgaaaggaagaataaagaatcaatcagtactggtggaagaggccctgccaggaggaaaatagctaagtcatgctaatgagtgaacatcagagtgaaaacaataaaaatgccatctcttgctctactgggctcttagttttcctgagtttctgtgacatagatctttaaaataaaattgttgaacgaaatgaagcaagttattatttgcaacccagagttcctaaatgatataccatttctctgttttgggaaaacccagccatcctctaagggtaaatttctggctctctcctctgttttctctcttcatttagagaagcacttgtcacattacctacatattggtttgtctctctttacccagagaatatcaggctgttaactctttgaggacaggttacattgtctgtgtttcccagcagcatactgtgtctagtagtaaacttgatatacaaaagatgttcagcatataaaaccagctactgttctaagcactttatagatttgaatttatttaatcttccccaaaatcctctgaagtagatactcgtattttcctcattttacagatggggaaaggtgagggacagagaaaggcttacgaaaagttgcaaagtagaagattcaatccaggaaatttggctccagagtcccagagcttaactactatactatatagcctgaactaaaggggaacgaggacagggaatactagttaatatgaatatttgagcacttatctaaaagcactttcacacatattatatgaggccatcaagagtctcctcattgtgggaaactagccagaagttcatccctgaaataccatatactcagattcttcctataggcacagaaaaatgaaaatcagtaaagggcacatgcagacttattttgtaaaaaattccatggacacctggtaggtaggtttgatttataggctaatgtctaagggaagaattgtattagagtatgaaaacctttcatatggggcaaagcagctactttctcagctattccaagaactgtgagtctctccctaaagccaacaattgagggtgtgtatgtggggtggtaggaagggtggatatagtggtgattccctagtgtattattgtttttaaaggagtctggctttagggagctcttgcagatgcctttattggcagtgtcaaccgtttctttgagttgccatggcacccaaaagacaaagttggggggctgtctattagtgaatgattaggagccaaataaaaaggaaagttctttgagggaaggctggggttgtttggggagcggggtggagctgggtgtttaagtattgatatagggttaatccagacaactcttggcatgacccatacacaagcaacaaagaccagaacaaacaggaaggcttacctaggagctttccagcatggtttcttcttcctaattgcctacgtctaagagagatctgagtaagtgaccagaggagaggtctgaagctagcaactgttcagcactgaaaatgttaagtattaatggtgccctgtagggacaaaaagagtctttgggctcctcagaaagtgagggaacagcaggagctgcctgtacctgaataaaattcaccagggaggtgagtgagatttctgtttgggatgaattcctggtgacacagccatatggcttttactgactgccatcctccagacagtatactctttttggggagaagctaaagtatacagaagattgtgctttcctcactgtcatctttaatccctcccccatcattagctggaactcttaaatgaagactcaagtgtcccaatctatccttccagcctgaattcctgcccaagatcaagggtcctccttccctttccccaagccacttccccacatctctgattttctccctagagtaggaggctccaggggaccacagctgactctgccaggcacagagggttgagtcattctgcaggcgtcagagctgttagcaacagctctgctgatctgtatgcagctccaactccctctccagttcagagttttggagccgtcttgttcaaaagtaaagaacagaacacagatggctggtaacaggatcccacaggggcctcctttcccactgagcccatcctgctaatccttttacagaagacaaaataaatggtgagtagagagagaggaaaaaaaaaaagagtatcggcttctgcactgttctgtgggtcctagtggaaggtctctggtaacaaccccaagctactcactaaatttcctaggcatattcccttcctgatccttctttctcttcatccacttcatttcccttccaatctcccattctccaacccagtttccttttctctgtagtatctattaatctgatggagtattttgcccaaatgccttctatttgtgccaggcaattctaatccttatgtgtataggacaatcaaaaatactaggagttcttggctgggcgcggtggctcacgcctgtaatcccagcactttgggaggccgaggtgggcggatcaggatgtcaggagatcgagaccatgctggctaacacggtgaaaccccatctctactaaaaatacaaaaaattatccgggcgtggtggcgggcgcccgtgtagtcccagctacttggggggctgaggcaggagaatggcgtgaacccgggaggcggagcttgcagtgagccgagatcgcgccactgcaccctagcttgggcgacagagcgagactccgtctcaaaaaataaataaataaataaaaacaaaagtactgggagttcagagtcgctcatttcatcaaccttatctcttgggaggtccccatagttccttctcttctactgaggtagcactgtgcattataaagaacacagactttaggtcaggacggtggctcacacctgtaatcccagcactttgaaggccgaggtgggtggatcacttgaggacaggagtttgagaccagcctggccaacacagcgaaaccccatctttactaaaaatacaaaaaattaactgggcgtggtggtacacgcctgtaatcccagctactcaggagaatgaggctcgagaatcgcttgagcccacgaggcggaggttgcaatgagccaaaatagtgccatcacactctagcctgggtgacagagtgagactccgaaccctgttctaaaagatacataaacaggccgggcgcggtggctcacgactgcaatcccagcactttgggaggctgaggcgggcagatcacgaggtcaggagatggagaccatcctggataacacggtgaaaccccgtctctactaaaaatacaaaaacaaaattagccgggcgtggtgtcgggcgcctgtagtcccagctacccgggaggctgaggcaggagaatggcatgaacccgcgaggcggagcttacagtgagccgagattgcgccactgcactccagcctgggcgtcagagtgagactccgtctcaaaaaaaaaaaaagtacataaacaaataaataaaaagctaaaaattctgctctgccatttactaaagatgtgagcttggccaatttacttaaactctatgaactccaggtatggcatctgatgatatctatagtagcatctactttgccagctggcttacagattagatagaggtaaaacatactatctggaatataataggtccccaataaatattaattctctctctatccccctgttgctgtaagtgccaggtccctgttttcaacaactgaaaaaaaaaatctcccactgagaaagttagcattcacgctcaattgctgctgataccagtgaggtaagagagtgggaagtgtgggtgagttttgcaagactagaagtctttgtaaaaactagcatgtgaatacactaacgttggttttccccaatatagggattcttggtgaagagtgctggtttcctcatgttggtgctgcagcatggttgatactaatttattttccttagaaaataagatgctgaggccgggcacggtggctcacacctgtaatcctagcactttggaaggccgaggcagatggattgcctgagctcaggaattctggaccagcctgggcaacacagcgaaaccctgtctctacaaaaatacaaaaaaaaaaaaaaaaaaaagaaagaaagaaagaaaagaaagaaaaattagccgggtgtggtggcaggcacctgtaatcccagctactcatgaggctgagacagaagaattgcttgaacctgggaggcagaggttgcggtgagctgagatcgtgccattgcactccagcctgggcgacagagtgagagactccatctcaaaaaaaaaaagaaaagaaaatacgatgctggtttgctgattgtgtggctttaggtaagttcttatccctctctgggcttcactagaacaaaagattactgctcctcttcactccaggaaattaagaggattcgttgaagtttgtgtaaactccaggtgaaaagttaagtacaggatggtattatccttggcactgagaatcccggaagtgtttttgcacaatcaggtcaaatgccattgtttagtttatgtgattaccaaagattcagctgacacagagttatggtttgacatggttcctttgttccggataataaacatgtgtaatgtcaattatactaatgtgttttgttctagtcgaaacaagaaggaggctggtgatgaggctgggacatcatacttcattctctctgaccaggcgcactctgacaacacgtttttcctgtctctctttgtaactggtaattaggttctcagctgagctgttaggaatcttgataggtttcccaggcagtcaccatctgacaatttacaactttgggcttttcacaactggcgtgttctcttccagggaacgaaagtttctcaatcttatgttcctcctatcattcaaagagtctgatctgagagaaatgctagctttctcaatgcattatctaattccaaagcagactgttgggtctcttagcagtgatggggaaaatctctgtgttcatgtgtgtcctgagcaataagggttgcccctatggtgtaataatggagtgaaagtcatcaaagccagaagtggcatggcagtatgggaatttaacatagcctttcaaaaggagaggaaataatagtaaaaattagtacagttgctttttctttctttttaaaaatagatggatcacgaggtcaggagagcgagactaatcctggccaacagggtgaaaccccatctctactaaaatacaaaaaattagccaggcgtggtggcacgcacctgtagtcccagctactcaggaggctgaggcaggggaatcacttgaacacgggtggcagaggttgcagtgagctgagatcatgccactgcacttcagcctggcaacagagcaagactgtctcaaaaaaaaaaaaaaaaatagagacgggggccggccacagtggctcatgcctagcattttgggaggccgaggtgggcagatcacctgaggtcaggagttcaagaccaacctggccaacatggcgaaaccctgtctctactaaaaaaatacaaaaattagccaggcacaatggcgcccacctgtaatcccagctactcgggaggctgaggcaagagaatagcttgaaactgggaggcggaggttgcagtgagccaagatcgcgccattgcactccagcctaggtgacaagaatgaaactccatctcaaaaaaaaaaacaaaaaaacaaagaaaacaatttttttaattttgtaaaggtgtgataatgatattgtggttatgctacaataaaggtctttgttacagatacatactgaagtatatacaggtgaaatgttatgatgatttataagaggtttatttaaaaatactccaggggcctcggtgaggtggctcatacctgtaatcccagcatttgggaggccgaggcgggtggatcacgaggtcaggagttcgagaccagcctggccaagatggtgaaaccctgtctctacaaaaaatacaaaaaaattagctgagcatgctctactaaaaacacaaaaaaattagctggcgtggtggcacaggcctataatcccagctactcaggaggccgaagcaggaaaatcgcttgaacctgggaggcagaggttgcaatgagccgagattgtgccactgcactccagcctgggtgacaaagtgagactctgtctcaaaaaaataaataaataaaaatactccagggggtgttgagtgggtgtgatggctcatgtctgtaatgccagcactttgggaggacaagacaggaagactgcttgagttcaggagttcaagagcagccagggacacatagtgagacccctatctctacaaaaaaattttaaaaattagctgagcatggtggcacacacctgtagtcttagctacttggggggctgatggggaggattgtctgagcgcaggaatttgaggctgcagtgagctatgactgtgccactgcactccagcctcgatgatagagcgagaccctgtctctaaaataaattaaaaaaataacaaactccagcagggagaataaaggtttatgggagaagaggtaaaagataatgataaagtgtttatactagttgaagctaggtgatgaacacctggaagtttattatttattgcactccttttgaatgtttgaaattttccataaaaaatttaaaaaatactagggaaagcctgaatctctttccactcccaaatgtatgaaataactagaagagaacattcttgctataacaatttcaggaaaatagatgaggattggaggggcatcttttaaggggtaggtgaaggaagaggaccctgccaggacaggaaggtggaaggaaatctggttttgagtggtgttgaaaaagccaaggaggaacacagtttcaagatggaaggactgtcaatgacgtcaaatattgcagatgacaggaataaaactattaaatgacttcactagacattgcaaccaggaagtcagtcttgaccttggcaagatcaatattagtagaggggggtgggaagatagataatttggaattccaagaagcttggctatagacaggagagatgaaagtaatctttcttttctccccaaagaagaagaaactagggcatgtttttaatgctgagggggagttgccatttgagagtggttgacaacataggtgaagagaggaatgaccaactcaaagagcaaggacccttactacaagaggtagtattgagaacaaatcatatacacatcccattgaagcagatagcttccttttctgatccttagagttaatttttatttttttattttcaagacagagtctcactctgacacccaggttggagtgctgtgggccactgtggctggctgtgagcttttaaaacaaacaaacaaaaagcaggtttggtgcaggggctcacacttataatcctagcactttgggaggcggacgtgtgaggcctgcttgaggccaagagtttgagaccaacctggccaataaagcaagaccctgtctctatttttattttttatttttggaaacagagtctcgcacggtcacccaggctggagtgcagtggcacgatctcagctcactgcaacctctgcctcccgtgttcaagcaattctcctgcctcagcctcctgagtagctgggactagtcgcacattgccacgcccagctaatttttttgtattttagtagagacgtgttttcactgtgttgcccagcctggtctcaaactcctgagctcaggcaatccgcttgcctcggcctcccaaactgctgggattacaggcgtaagccaccaagctcagccttttttttttttttttttttttttgagacagagtcttgctctgttgcccatctcactcaaacatgtctacagaaggatgcctgatagaagtgtggttttacaggctggaaaataaagctgatcatgtacggagttgcttcttgagctccatattctcatataatgtgatccattttgtgaaaatctttttaaaatgccaatccttttaaaatgccctgcacatggaggcagcatattcttctattttaacctacaagaatagataaatactgggccaaggtacgtaacagttggtagaatacaacttgatataagaaagtcctgacctaggccgggcgcggtggctcaagcctgtaatcccagcactttgggaggccgaggtgggcggatcacgaggtcaggagatcgagaccatcctggctaacacggtaaaaccccgtctctactaaaaatacaaaaaaaaaaaaaaaaaaaaaaattagtcgagtgtggtggcaggcacctgtagtcccagctactcgggaggctgaggcaggagaatggcgtgaacccaggaggcggagcttgcagtgagccgagatagcgccaccacactccagcctagagacgagtgagactcagtctcaaaaacaaaaacaaattgactttgggttgggcatagcggctcactcctgtaattccagctactcagaaggctgaggtacgagaattgcttaaacccaggaggcagaagttgcagtgagctgaaattgtgccactgcactccagcctgggcaacacagtgagactctgtctcaaaaaaaaaaaaagacattgactttggagttccacttccatcacttactaatgtcggtagctgcccttactttgtgtcattctcataaccaagctgaggattcttttctttatctgtaaaatggggttaatattaccttcttcagagggtcatgtgaagattaagtaagtaagattaagtaacatgtaaggtgcttagcaccatgcctagtccatggaaaatgttttaaagtgttagctattactgtgtatgtgcaaggaggtaaatattcatcccacttctctgacactaccctctggcaggcatcccatgatcagtgcatcatggttgattgtctgggacatctgtggctataggaagggttgggcagcatgtttgtggactgagaggtttttggaatgtatcttcaggacgagttggtgattttattatgccctttgctatggctgacatctgccaggatttaaaaaaatctacatgaattcctaccagatttctgccacacatcatatgaaacacaaacagctggcaatcaaaacataaaataagttaatattttattggcttgggattttctttaggcttcctctttggacttctctttactaaataggagtaatatactagtaggaagtcttttggggccaggtgcactgattcatgcatgtaatcccatgactttggtaagccaaggcaggaggatcacttgaggctagagttcgagaccagcctgggcaacatggctagaccctgtctctacaaaaaataaaataaaaaattatctgggcatggttgtgtgtgcttgtaagtcccagctacttgggaggctgaaggtggaggatcccttgagctcaggagttcgaggctgcagtgagctatgatcaccactgtacttcagcctgagtgacagagcaagactctgtcttaaaaaaacaaacaaacaaaaaaagaagtcttgtggttgaaggtgacaattcaaatcagctttttttttttttttttttgagacggagtcttactctgtcgccaggctggagtgcagtggcgtgatcttggctcactgcaacctccgcctctcgggttcaagcaattctcctgcctcagcctcccaagtagttgggactacaggtgtgcgccaccatgcctggcttaatttttgtatttttagtagagacggggtttcactatgttggccaggctgatctcgatctcttgacctcgtgatccgcccgcctcggcatcccaaagtgctgggattacaggcgtgagccactgtgcccggcccaaatcagcttaagggtgggaaaaaagaaatatattaggccctgtaactgaaaaatcagtgccacaggagcttaaaaagttttgttaagtgtttgactctgtctcccttttttctgtctctccacacaccacacccagctcccaatccctgggtatttttctttatagattgggttttgttataaagttgagtgtccatactgggtcaggggatacagctggtgaacttgggtgcttcccactgctgccacctagttttaatacacctcaacactgaatgctgtcatggatactgtctacacacaggaaatgaatcaggaaaatttctaatatctgttttaatcaaatgcttcctttggccaggtgcagtggctcatgcctgtaatcctaacagtttgggaagccaaggtgggcagatcactagaggccaggagttcgttaccagcctggccaacatggcgaaacgccttctctactaaaaatacaaaaattagcccagcatggtggtgcatgcctgtaatcccagctactcaggaggctgaggcacgagaattgtttgaacccaggaggcaaaggttgtggtgagccgagattgtgccactgcactccagcttgggcaatagagtgagactctgtatcaaaaaaaaaaaaaaatcaaatgcttcctttactgatatgttgtattatacccactagagacagtgagtgtctcaaaattcaggttttaaacaacctctcctacataacctgctctctcctactcactgcccagaaacccccgaagaagggacagaggtctggcccggatatcatatggcaccatgtaaatggttaccatgaaacttgccttttatttctcctcttcataaatttactcaacacagaaatgttagaatgttgtaaatgtagaatttgaaggcatttgagactttgtgaggatgagatcagaacttggagcttatgaaccatagacatgcttctataagcaatttaagcaggcttcacatagatcatatggaggaaagcttgcatcttggtagtttattttatgcaacagagggatgctggatgagggagatggggtctgtgtgggaggaactccatagaaagtctagatttacatcatcccagtttatgagcccaaaggcaaagcaaaacttctcactctcacaaagcagtatataaaatccaaatgaacatctctgagtggtccagcttgggctctgggtcatgtacccttccctggcccagttgcttcaccaaggggtgagctattttggttgcccacgctgtgacggcgtgcccatctgtagcaagaggcccagagtaacaaccccacaagaactccacagaacaacagacaggaaagttctctaagaactgtagagtaattaaaaaaatttttttttgagacagggtctcactttgtcacccaggcttgagtgcagtggtgtaaacagggctcactgcagcctcaacttcccagactcaagtgatcctcccacctcagcctccctagtagctgggactataggtgcacaccagcacacccagctaatttttgtagagatggggtttccccatgttgaccaggctggtctcaaactcctgagctcaagtgatctacctacctcagcctcccaaagtgctgggattgcaagtgtgaaccaccacacccggccatagggtactttttgccagaagaagagggagaaatttgggacagacaagaataacagatgttcactacaagtggaatagaactgctagtgaggctaactgatacgttttttgtggggatgctagctagagtagaatatattagcacttgtggtcaggtgaaataaagcagctatcacctggatacaacagaactttcatatccagacaggatcttcactataagtctgagacatgggtagggcatattcattttacagtatatgcttttgggagtcaagagacacagagaagcatagcagaaaacacatcatttacatgacaggaccggctataactccgatacgtacatcagtttgggaagcaggtgacttctagacattcttagaaccttagacaatcctgaaaacatttgacatgtgtaagactccagaaatacccatcggccaggcacatagtgccaaagtgacagtaacctccagagaactctagcatgtgtgtacaccttttcctagagttctctgtcacactaacatttgcagcagctattcttccatacactccaggcaaacagctttcattcactcactcttcttgacatctcccacacctaacccaatttctgacacataggagaaaatgtctgcagaattattgaactgatagcaaacatttgttgaatgtcattatgtacattatgctaagtttgtggacatagatataaataagacaaatattcatatgcttgtgaagatcacagcctggtgggaaaggccaaaaaataaacagttctgtgtgaggactatttggttgcaaacaaaagagaaccagacccaacgttagcttaagaaaaatgggaatgttttagcacacaaatgctaaaaactccagggtcaggactgacttcagacagagttagttccagggcttcagtgatctggttttatctccagaatgtgtttcccactgagttgcctttgttctggggcttcacagcaaaaggcaatagcaattccagtccttacattctctcaaggaaatagaatgtagtggctctgagaactgcttgaacccgggaggtggaggttgcagtgagctgagatcgtgacactgcactccagcctgggcaacagagcgagactccgtcccaaaaaaaaaaaaaaaaaagaatatagaccgagcacagtggctcagcttgtaatcccatcactttgggaggccaaggcgggtgaatcacgagatcaggggttcgagaccagcctggccaatatggtgaacccccccccgtctctactaaaaatacaaaaattagccgggcgcagtgacacgcgcctgtagtcccagctattcaggaggctgaggtagaagaattgcttgaacccgggaggcagagattgcagtgagctgagatcgcgccatggcactccagcctgggcgacagagtgagactctgtctcaaaaaaaagaaaaaaagaaaaaaaagaacacagtggttctggatgaaagctgagtttgacaactggcttcaccacaaactggctataagaactttgacaagttaatcaaaattcttctctgtgcctcagtgccactctttctttctttctctctctctctctttctttctttttgacagagtctcgttctgttggccaggctggagtgcagtggcacaatctcctctcactgcaacctctgtctcctgggctcaagcaattctcttgcctcagcctcctgagtagctgggattacaggcgtgtaccaccatgcccggctaatttttttcacgatgttggccaggctggtctcgaactcctgacctcaggtaatctgcccacctcagcctcccaaagtgctgggattacaggcatgagccaccgtgccaggcccagttccaccatttctaaaagggaataataattatacccacccaatatggttattgtgaggagtaaataagtagagtgtttagaactctctctggcatataatcagcactcaatacgtgttaactatttcactatttttgttatcatcatcatcaaatttcagaaactttgtgcagtggcagtattgtagccaatgagatttatccgaggtgtgattattgctcattgaaaaatcataggctgggcacggtggctcacatctgtaatcttagtactttgggaggccgaagcaggtggatcctttgaggccaggagttcaagaccagcctgggcaacatggcgaaacccatctctacaaaaaatacaaaacttagccagcacggtggcatatgcctgtagttccggttacttgggagactgaggtagcagaatcatttgatcctgggaggcagaggttgcagtgagccaggatcacaccactggattccattttgggagttcaatatatatattacatttttgggagaaaataagaaagtttctttcccaaaaagccagagaaaatcttattgtacccattggctctaattggatcatgtgcccatccctgagccagactagaggaaggtcatacatacactgtatacacggattgcttaggtctgatcaacatgctccttccttggagcacagatctactatggccagcctggtctcgaactcctgacctcaggtgatccgcccgtctcagcctcccaaagtgctataattacaggcgtgagccaccgggcccggcccagagttaatttttattcatgaaactcatataacaggtttatttatttcagtcgttttgttggttaaagaaccaagattttttatgactacactttgtgtacacttttaggttctctcttttttttttttttttttgagacgagtctcattctgtcgcccaggctggagtgcagtggcgcaatctcggctcactgcaacctccgcctcccgggttcacgccattctcctgcctcagcctcccgagtagctagctgggactacaggcgcccaccaccacgcccggctaatttttttctatcttttaatagagacggggtttcaccgtgttagccaggatgctctcgatctcctgacctcgtgatccgcccgcctcggcctcccaaagtgctgggattacaggcgtgagccaccgcgcccggccttacacttttaggttcttgaataagtactgagggagttttccctaaaaaaaaaaaaaaaagttttgagataaaagaataaaaactctacttcttctttgcataggagtctttagtttgtttgctgctcttgttccaaaacttctcattactcaacctactaaacccacagacacttttcaagaagttatctcttttctacatcaccaatatatagggtggcttagatctgtatttccaagtcttactgtcgttccaagaattagtatcaactattagaatctcaaaaactcaactgcatactgattgcgctgcccagtgtacctctgaatcccacgggggagggggtgtagaaccgagttgtgcaggaatgggatattccacacttcagggcaaacttattcgcaggatcagtggcgggctttggaggtgggaagcaggaaggaaggggaatgcagataaactcttcttcttcagatctccggggtgaaatgaatgcacctgacgcccgcgtggcattagaagctccgcgaactcagtgaggccatgctggacagaggctggaactccgggccaccgggacaactctgcccgtagcaagccttgcgcgctcctgtgagggcgcgcgcgcgcgcatgtagtcgtgtctcgcgcagggtccggcctgtcaggcggaaaatctcgcgagatcggagacgggggatgacggtctggaggaggggagtggtgtcgggtaaagggggggaagctgggcagcggccgggctctgtggcttcagggctcggggagagagagggagggtggcaaagagactgagtcggtgccgccgcctgcctgaggagagaggaggggtcccgctcgccctgcgcccttcgcgggccgaaagcactaggcactcgcgaacatctgaggcctcccggccccgggggaccccgccccgccgtccgccggccggcccgcggcctctcttccctttgtgagcgcctccttaccaggggtggtgttggtggcggagggctgcgcgtgggcccgcccgccgaggggccgcggcgggggaccgagagggcctcggctgtgtgaggactagaggcggccgaggcccgggccggttcccccgaggcggcgacggagacggctcccggcacttccccgcgccatcttaactgagcccaagcgctgagggcgcctcctcgaccccggtcgtcccctcgcccccccccccaccccccgccgccgccgccccttgttgcagagcttgggctgggcggcttgctggggctcgggggtggggggcggcgatctgtcgccgggccccctcctcctcctcactcctcaccctccagggtagcggctaccggagcgctgcagggggctgcgcctgcctgctccgccccagacctgtcggcgaaagggtaagggcacctctgctttgggaaagggggatatagaggggggcggggaaattcggcccactcgggcctgtgtgtggaagaagggatgtgggagtggggtgggggagggagaaaaggagggtctgtgattctgtgggtggggtgaagaagctggtgagctgggcgccctccggttttaaggggcgagagcaattccattcctttttcctgagggtcaccggaaggggtggtggaagggggatgtttcgaggaaggtgtggccctcacagggagactgggttgatgtgcaccccggtttaaaggcgcgaggtccccttcccctctggtgcctttgctcctcttctcctttgtagtgtctgtgtattcttgggaagggagactgctctgggtggcttgctgggtggattccaccccctagcacaggaaatctatacccctcttctgtaggggcgatggaagcgtttctctccccgtacccttcccccttccccatcctctagtctactgcaatgctgcagaagtccaaggcagtttcttcatacacagacccatgtatacacagaagggagggggagcaggagagggaagtaatggcgcttcccttgaaaaggttactctttttcctttggttttaaatcgacgacagtatcgttttaatactcttcccctgagatctgtccatgggaagtgtatctgttctggtgttattgttgggggatatggcctctcgagagggacacctctcctgttagaacagttttgatgtctctctttttgagagatgtctggattgacattttttgtgagcaggttggattttagttagaattcaaataaaataattttgtacctcctcatcctcatttcccttttctttttctatgacttttgtagttcatgaagaattattggcctggcgcggtggctcacgcctgtaatcccagcactttgggaggccaaggcgggcggatcacgaagtcaggagatcgagaccatcctggctaacacggtgaaaccccgtctctgctaaaaatacaaaaaattagctgggcatggtggcacgcgcctgtagtcccagctactcgggaggctgagggaggagaatcgcttgaacccgggaggcggaggttgcagtgaggcgagatggtgccactgcactccaacctgggcgacagagcgagactccgtttcaaaaaaaaaaattattaacaattattacatacagacagcctgtctgattcagggcatttctccctaagctgtgaatttttagggttgatactgttgtgtataatattgaaattggattttttttaaaatggtaaggttacaaacctttctgcagctgtttctttgttcttattaatctgcctaattattctatgatctattttctgtagtcagtcatttttcacttcttttgctacctgtcatgtttgtctgaaagcagatcatcttatctggtttacagtagtacttgttggttttgttcttagttgagtagaaataaaaatttaaacattctggaaatgtgctgccaagtgctttttgtgaccaaagagtagttttcaagtctccatgtactgatgatacatttttttcaagtgtttagtaaatactggtgatgtgatttcaaaatattccacatatgactattaatagaattaattttttcccaaagtgaagaagaagactaaaatgtgtacagataatgagttgtctttggtgtatttagtgttttcagctctacttagtgacttatttttaaatacttcaaatgccatctacattttatgttgtcattaaatgttgtccaatagagcttttttggtgtgtttgttgcattttgaaacctgttttaagatagggatttaaaggtgttagtagtagcgctaggcactaacttagtttctgtcattttatatcatgattttgatgtaggagacatggtatgttaaataagttttatttttttttctcagaagatggaattctcttttctttattcccttttaatggtcatctcaattcattgaaataacactattcatttgagtatttatttcatgggacaaagctgcatgttgttgatatgtagagttttctccattatggcaaattatgccaggaagtctgattctccgtattatggcttgttgttgataattatttcatatatactagcatgtgttgatcgaagcatactgctcagtaaggagtgactgcttttaccttgggaagttgtaggcagagaggatttatcaatagaggctacaaaacttaaaggatttacatagggtgtaggttaactatttacttgctatatttcagcatgctataactaaggacaactgaaaaaaaaacaactctcttttttcatagctggtaggaatgttgcctaaaagtggaaaagtatgttcatgatcaattagataaatacattattaaggaaaaattgcctgagggttatttcagatgacctctgatgccactgtcagaaagaaaatgctgagagctgttagtctgagttgattctagattagtatggcacttcttatgtttctaaatagttcatctacaaaatggcagtgtacatcacttcctgttctttcacaactggctctttcactggattctcttttaatgacttaatttttggcattctgatatctgatttgttaatttggttataattctcatgttttataggtggaagaatttctgagaatcagctggatttaaaggcttttaatagtttaagattatcttgacagtaacaaaacattgcttccaaactaaaggatagtattgcaaacaaatttaaactctgagaggttttaaagaagtacagcaatgtacagaatcagaagtatgagggcactgaatagaaaataattatcgtattttttataatgtcgattttgggagaagtgaggatatggcaagtaattgaatgggtgttgatataaaataaactttctgtataacaaggtgtatacatgatatttgggcccatgttacgatgccattttaacagtaagaaagcaactctttagttacaggatactagaaagactggatgctcataactaaccatgagtatgatttattttaataatttgccagtttttttttttttttttttttttttttttttttgagacggagtcttgctctgtcgcccaggctggagtgcagtggcacgatctcggctcactgcaagttccacctcctgggtttacgccagtctcctgcctcagcctcctgagtagctgggactacaggcgcctgccaccaagcccagctaattttttgtatttttagtagagacggggtttcactgtgttagccaggatggtctcgatctcctgaccttgtgatctgcccgcctcagcctcccagagtgctgggattacaggcttgagccaccgtgcccggcaaatttgccagttcttaatagacatgaatatttagtaaatccagaagatatctaggggtcagttgttggcattgaaattagagttgagatcaatctgtctttcgtgtctttcacctggaaataaagtctgtgttttgcatttggcttatttgtatattaaaatcacttaatttttcatttgtatctctgttttgttttcactagtctctgttacttataacaattaattgcactcatactaatttaatcttttagaaatgaggagcatttttggtacatattagttgagggttgctgtttggatgaggatcatatgtgaacgaatcccttcaaaaaagtgttatttctgggctgggcaaagtggctcaggcctgtaatgccagcgctttgggaggctgaggtgggaggattgcttgaggccaggagttcaagagcagcctgggcaacatagcatgaccctgtctctacaaaaacaaattttttttttaattagcatgggctaggcatggtggtttatgcctataatcccagcatgctgggggctgaggctggaggatcacttgagcctaggagtttgaggccagcctgggcaacatagtgagaccctgtctccaaaagataaaaaatgaaaatattagtggggcgtgatggtgcgtgcttgttctaactacctggcaggctgaggtgggaggattgcttgagcccagaagatggaggctgcagtgagttgtgatcatgccaccgcactctagcctgggtgacagagtgagactgtctaaaaacaaaagcctgtgtggtggctcaagcctgtaattccagcactttgggaggccaaggtgggcggatcacctgaggtcaagagttcgaaaccagcctggccaacaaagagagaccctgtctctacaaaaataaaacaaattagctaggcatggtggtgggtgcctgtaaccccagctactggggaggctgaggcaggagaatcacttgaacccaggaggtggaggttacagtgagttgagatggcgccactgcctgacagcctgggcggcagaacaagactccatctcaaaacaaaacgaaacaaataaaaaagttttatttctctagtaaagtttcgcataaaattgagatgttcattaagcagagtaccaacatatgctcacctgcctttaggtatgtgtacttttttttttttttttttttttgaatttgagacagggtttttgctgtgtcgcccaggttggaatgcaatagcgtgatcacagcgtattgcagcctcagcctcccgggttcaagtgctcttcccacatcaacctcccaagtagctggcactacaggtacatgccaccacgtctggctaattttttttttttttttttttttttgtagagatggggttttgccatgttgcccaggctggtcttgaactcctcagctccagctatctacctgccttggcctcccaaagtgctgagattacagacatgagccactgcacccggcccgatttccgtacttactattaatggttggattttaaaaattattcttcaggttttcctattataaaatatgagaggatacaacctgtattagttcattccattcttaaagtattttagtttttagtaataaaaattgatgtttaatttcattaaagatgtctcataccttctaaaaatctacatgaattaaaaagttgtgtggagggactagcagcaattattttcagctgggacgtttctgtcatcatatggtaacagttatttctgtatcagtctatttgtgccagaagcagactttttgttctaaaatacagtctaaggctatacctttttgatgacaaaattaagtatcctataaaagttggaagagtttttaaaatgttaagtacctggcatgtaaataaagtaagtaaaagtataaattattaagtgccttgcataatagatatactgcagcctcctaaaaatgccagtgaccgttatgctgtaggttgttatttaaatataatggcacttaattaccgtctaatttatctttaaagctgagaaggggctaatttttccttttgataaaattatttgatcaaatagttttatgcaggtttagaagtagatgaattactgtaacatttagaaagacattcaaagtttagtttctgagaaatattatcaaataataggatggaacaaaactttctggtttgcagctaccaataataaaattggcacttactatatattaatgttggctgggcgtggtggctcacgcctgtaatcctagcactttgggagaccgtagatcactttaggtcaggagttcaagaccagcctggccaatgtggaggaaacccgtctctactaaaaatacaaaaaattagctgggcgtggtggcgtgtgcctgtaatcccagctacttgggaggctgaggcaggagaatcgctggaacttgggaggtagtggttgcagtgagctgagattgtgccactgcactctagctgggcaacagagtacaactctgtctcaaaaaaaaaaaaaaaaaaaaagggctgggcatggtggctcacgcctgtaatcccagcactttgggaggctgaggcgggtggatcacctgaggtcaggagttgcagacgagcctggccaacgtggcgaaacctcgtctctactaaaaatacaaaaattagccgggcgtggtggcacttgtctgtagtcccagctactcgggaggctgaggcaggagaatcatttgaacctgggaggcagtggttgcagtgagccaagatcgtgccactgcattccagcctgggtgacagagtgagactctgtctcaagaaaataataaaaaagttaaaaaatggctgggtgccgtggctcacgcctgtaatctcagcactttgggaggccaaggtgggcagaacacaaggtcaggagttcgagaccagcctggccagcatggtgaaaccctgtctctactaaaaatacaaaaaattagccgggcatggtggcgcgcacctgtagtctcagctactcaggaagttgaggcaggagagttgcttgaactcagcaggcggaggttgcagtgagccgagatcgtgccattgcactccagcctgggcaacagagtgagattccgtccccccccaaaaaaatatatatatatatatacatgtatacatgtatatatgtatattcatgtatgatacatgtatacatgtatacatgtatattcatgtatgcatacatgaatatacatgtatgtatatacatatatacacgtatatatacacgtatgtatatatgtatacatgtatattcgtgtgtatatatgtatattcatgtatgtatatatgtatatacatgtatatatatgtgtatatatatatatgtatgtcaccatttactagtgtaaatgtgtaactttttcagtttttgtttttttgagatggggtcttgctgtgtcacccaggtgggagtgcagtggcacagtcatggcccatagcagcctctaccttcagggccgaagccgtgagtagctgagactgcaggcctatgccaccatacttggcttattttaaagtttttttcgagaaacggggtctctatgttgcccaatctggtctcaaactcatgggggctcaggcagtcctccctcctcagcatcccaaagagctgggattacaggcatgagccacagtaccaggcctgtggtaacttctttatttaactatttatgcctcaccttttcttttctttttttttgagacggaattttgctcttgttgcccaggctggagtgcaatggcatgatctcgctcactgcaacccctgcctcccaggttcaagcgattctcctgcctcagcctcccaacagctgggattacaggtatgcgccaccatgcccagctaattttttgtatttttagtagagacggggtttctccatgttggtcaggctggtcatgaactcgtgacctcaggtgatcgcctgccttggcctcccaaagtgttgggattacagatgtgaaccactgcgccaggcttcttttcttttcttttcttttctcttttcttttcttttttagagatggagttttgctcttgttgcccaggctggagtgcaatggcgtgatctcggctaactgcaacctcagcctcccaggttcaagtgattctcctgcctcagcctcccgggtagctgggattataggcatgtgccaccatgcctggctaatgtttttgtttttttagtagagacagggtttcaccatgttggccaggctggtcttgaactcctgacctcaggtgatccacccaccttggcctcccaaagtgctgggattacaggcgggcatgagccaccacacccgttaatgtgaagatagtatatactgggttgtttaaataggataatgcttgctaagtacttaacttactgcctgatacatgctaacactcaataaattgttggctatcacacactagctgcctaatataaatgtttatgagtacattgagataatttttttttttttttttttgagacagggtctcactcctgtcacccagactggagtgcagtggcacgatctcggctgcctgcagccttgacctcccaggctcaagtgatccacccacctttgccctccaagtagctaggactacaggcaaatgccactgcctggctaatttttgtattttttgtggagatggggttttgccatgttgcctggtctggtatcgaactcctgagctcaagtggttccacctgcctcagcctcccaaagtgctggggagagtctaatatttaaggatgagttgcattatataattttgatttgatattggatttatttttatttatttattttgagacggagtctcgctctgttgcccaggatggagtgcagtggcacaatctcggctcgctgcaacctctgcctgccctgttcatgccattctcctgcctcagcctcccaagtagctgggactacaggcgcccgccactatgcctggctaaatttttgtatttttattagagacggggtttcaccgtgttagccaggatggtcttgatctcctgacctcgtgatctgcccgccttggcctcccaaagtgctgggattacaggcgtgagccactgcgcctggtgatattggatttatatatctggagtctgacatacatttttgaaagaaatagttagaatatcaaggtagcttagtaactttttgcacctataatggactactgtgtagtacttaatgggagtttttttctttctttgggatagattctcgctctgtcactcaggctggagtgcagtggtgagatcaaagttcactacagcctcaatcttctggacttagcgatcctctcacctcagccacctcagcagctaggactacaggcgtgcaccaccacacctggctaatttttttttatttttagtacagacgagatctcactatgttgcccaggttggtcttgatcttctgagtttaagtgatccttctgccttgttctcccaaagtggtgagattatacacaggagccactgtgcccacctctgatgggagtttttaatttatcacaggttttctttttcctttgctggatataaagcctgtcttaagaaatgacatttcaggccgggcgtggtggctcaggcctgtaatctcagcactttgggaggccgaggtgggtggattgcttgaggtcaggagttcaagaccatcctggccaaagtggtgaaaccccgtctttactaaaaacacaaaaattagctgggtgtggtagtgggcgcctgtaatcccagctacttgggaggctgaggcaggagaatcacttgaaccaggcagaggttgcaatgagccgagatcgcgccattgcactccagcctgggagacaagagcaaaactccgtctcaaaaaaaaaaaaaaaaaacaacaaatgacatttcttttccagtacttactttgtttatttaagaaaaatttggtatccctcttctacctcctggagctctttttaccatccctgtctttgaagggattcagagtacccatgctcttctacgcatttttatttaggtatcttttgtaggtatgtccttaccttgaaagtgccttacgttccaaaatgtattaattcaacaaactttaagtgattattatgtgccagataagacagtatttcagccctgggagaattccaccttctgaatagttttctcaagctagataatcataggaaagcaaggactttcccataatttttagttcctctaagccagtgctttcaaactttagtttgtgatccattaatggcttgtaaattcaatttagtgagtcacaataacaattttaaaaagtaatggggagtgtcagtgtggtgcataaagtaagggtaaacattattatgggaaacttttgtttgcctctttttttttttttttttttttttgatgccagggtcttgctctgttgcccaggctggaacgcagtggtgtgatcatagttcactgcggcctccacctcctggctcaagtgatcctcccacctcagcctcctgagtaactgcgactacaggtgtgcaccaccacacccggctaatttttgaaaaaatttttttgtgcagacagggtcttgctatgttgcccaggatggtctcaaattcctgatcttaagttatcctcttgccttggcctcccaaagtgctggtattacaggtgtaagctattgtgctcagcagtttgccacatttttatatgttctgggtacccagttacactgttataaagacatacctgagactgggtaatttataaagaaaataggtttaatgtgctcacggttctgtgggctatacaggcatctgcatctggggaggcttcagaaaacttacaatcatagcggaagtggaagtgggcatattttcccatggttggcaggagagagagggagagtgtgcatgtgtgtggacacgcaagcgagtgaagggggaagtgctacaaactttccactttccaacaacagtagctcttgagaactcactatcaactagaacagcaagggggaaatccaccccaatgatccaatcatttccaccaggtccctcccccaactttggagattacaatttaacatgagatttgggtagggacacagagccaaaccatatcactttctttttcttctctttttttttttgagacagggttttactctgttgggaggctggagtgcagtggggtgatcatggcttgctgaaacctctgcctcttgggctcaagcaatcctcccacctcagcctcctgagtagctgtgccaccacgcctggctaatttttgtactttttgttctttttgtttgagacggggtttcgccatgttggccaggctggtcttgactcctggcctcaggtgatctgcccaccttggcctcccaaagtgctagaattataagcgtgagccactgtgcctgaactaaaatttctttttttacctcatcccttttacttctaatcttctgtctctgaagtatgcttgttttagtttgctttttcctttttctttcaacaactctccttcaatctctactgattcatctgtagtctatttagtcgttatattgggtatatttacctttcctaggtttcaaagcttaggagatagcaaggactttgcctaaaaggtcctgggcagggtaccagtagttttggataatcatggtaacttctgaggtttttgtattaaggaacgtgttatcagatatctaatgtcacacactatgtgtgagtgcagtttctcatgaattgcagaattttaaaaaaagaagactttctatttaatttttttaagacggtctcagtccccttccctatgctagagtccagtggcacacaatgatggctcactgtgcctctacttcccgggctcaggtgatccttttacctcagcctaccaagtagctgagactacagtcatgcgccaccatacctgactaattcttttgtattttttgtagagattaggttttgtcacattgcccaagctggtctcgaactcctgagctcaagcaatctgcctgcctcagcctccgaaagtgctgggattacaggtgtgagccaccatgcctggttgaaaactttttatttggaggatattaagaaaatatcttttatttttattttatttggggacatatatagatttgatttaattgaaatacgtctgttcataaaattattatgtgactaattaagtatattaagtatattttaaaaatgccaggccagacgtgatgggtcatgtctttaatcctagcactttgggaggccgaggtgggtggatcacttgaggtcacgagttcaaaaccagcctggccaacatgctgaaaccctgtctctactaaaaatacaaaaaaattaggcccggcgcagtggcttacgcctgtaagcccagcactttgggaggccgaagtgggcagatcacaaggtcaagagatcaagacagagcaaaacttagtctcaaaaaaaaaaaaacaaaattagccgtgcatggtggcgggcacctgcaatcccagctactagggagcctgaggcaggagaactgcttcaacctgggaggtggaggttgcagtgagccaagattgtgccattgcactccagcctgggtgacagggcaagattttgtctcaaaaaaaaaaaaaaaaaaaaaaaaatcagtgtgctgcaatgtgttacatctaaccataatatttatgttttagttgatgtttttaattcactcatggtagtagttacaaacctctagtttgtattttggattgatttgttacaatttattcccattgaggctgagaaagaggtttcagaaaaggttgatgaacagcattactaaacaaggtcaaggtttttccgtttttagacttggggaatttagggttactgaaaattggaaaagctttgtctttttgccaaaaccatccatatccttgattgtacttgataaggaaactttgctcttccttgttgtacagaaactttgtatagtatatgttgttttatttaatatatagtatttaagtaatctcctgctgcataaatggtagatgatgatgatgttttatagggctcattacttgataggagtatggtatttcagttggttttatttactggaattagagttttgagtcccagaggggcaatataatgtgctcactttcagattcttttttgttttttgtgtttcttttcagacagggtcttgctctgtcacccaggctggagtgtagtggcacaatcacagctcactgcagccctgacctcttacaccgaagcagtcctcatacgtcagcctcccaaagtgctgggattacaggtgtgagccaccatgcctggcctagattctttactttgacatgtcgttattagtgataatgattttttaattctctagaaaagtacaaataatttgaaaatggagtaattaaaagatcattttatcttcagcttaggtagtgaaaaagtatttttgtgttttatgtgtgaatgtctagttctataaaataatgccattaatctttaatcaagaataaaaaagttggctgggcatgtaaaaaataaaacagtgttgagatatgaaatatttctgtgtgtgtgtggggggggattttgttttgttttgttttgtttttgagacagggtcttactcttttaagaacctgttgtaggactccagactggagtgcagtggtaggatcacagctcactgcagtcttgacctcctgggctcaagtgatcctcctgcctcagccccacaagtagctaggactacagccctgtgctaccacacccagcgaattttttgtatttttagtagagacggcttcaccgtgttgcccaggctggtcttggattgctggactcaagtgatccacccagctcaatctcccaaggtgtcaggattacaggcatgagccaccacacctggcctgaaatatttgctaaaataagtaaaataactatgatataaaaacttttggctaggcatgatatcttccgcctgtaatcccagcactttgggagactgagacaaggggatcgcttgagcccaggaactcaagaccagcctggcaacatagtaaggcctcatctctactaaaaataaaaaattagccaagtacggtggcatgtgcctgtggtcccagctactcaggaggctgaggcaggaggattgctggaacctaggaggatggagttacagtgagccatggttgtgctactgcattccagcttgggcaacagtgagaccctgtgtctaaataaataaataggtaagtaaaaactgtttaattttttgacaatatgttaaaatacactaccattctgtattttaacataaattttattagattcaagttaggtggaatgatagccaagattttagtatccattattttactctattttattcaaatggcactatgatatgagttcaaaaaatttttgaaacagtgtcctttgttttgagatggagttttgctcttgttgcccaggctggagcgcaatggcatgatctcggctcaccgcaacctccacctcccaggttcaagtgattctcctgcctcagcctcccaagtagctgagattacaggcatgtgccaccaggcccagcttatttttgtatatatatatttttagtagagatggggtttcaccatgttggtcaggctagtctcaaactcgtgacctcaggtgatacacccgccttggcctcccagagtgctgggattacaggcgtgagccaccttgccctgctgaaacagtgtccttttaaaaatgctttcagagcacagtcattaagccagttggtttactcatgctgcagtaaatttggaaataaatttcagtttaatactcttttgagatattcacatagttataatttgtaatttgttggtatgtactatgaaaacaccaagtcaagatagtgattgatggaatttgcttttaaagaccacaagtttaggccaggagtggtggctcatgcctgtaatcccagcattttgggaggccgaggtgggcggatcacctgaggtcaggagtttgagaccagcctggccaatatggtgaaaccccgtctctactaaaaatgcaaaaattagctgggtgtggtggctctcgcctgtaatcccagctactcgggaggcagaggtaggagaattgcttgaacctgggaggcggagtttgcagtgagccgacatcgaacctctctactccagcctgtgagacagagtgagactccatctcagaaaaaaaaagacaaccagtttagccagtaagttatgtagctttcatatcaaagtaagattcagcaatgacatacgtatttcttatattttttgagtgcagcattctaggcagtgtggttattaaaataggttcagtaatgacacatctgtatttattaatacatttttttggtgtgttattttgtagatactgtgccagtatacagaaatcagtaagacttgatccctcccattttgtagtttagtagggatacaggcttgcaagtaaatacatacaatagtgtagtgcagggtttcccaaccgtggtagtattgacattttgggtaggataattcattgttggggggatctgtgctatgcattatagcatattttgcagcatcactggcttttacccattagatgccagtagcgtcacccctggttgtgatgatcaaaaaatgtttcaggtattaccaaatgtcccctagggagcaaaatcacctgattgagaaccatttatttaactgttatacaggtagagttaaggggtgtttaggagtagtgactcctgagggagtgagattttatatgggtcttgaaaaaaaaataaaagtacaaagggtattatatacctgagagcatgaatgatcaatattgaagagggtgattactgatcatatgtggctataggttatttatgtgatttgggatgggtatttggtaaaatgaagctgaaaaggtacttttgggccatatcttttttcttttcttttttcttttttgagactggatctcactgttttgcccagactgaagtgcaatggcacaatcacggctcactgtagccttgcttgacctccctggcccaagcagtcctcccacctcaggttcccaagcagctgagaccacaggagtgcactacccacccccccaactaagcagctgggagactactggcatacaccaccatggccagctaatttttgtagtgacagggtttctccatgttgcctaggctggtcttgaactcccgggctaaagtgatcctcacacctcggcctcccaaagtactggcattacaggtgtgagctaccatgcttagccatttttctttttttaaaactgtttgaggtataattaatgcagcaaagtgcataaatatgaagtgtaagcctgttgaatttttacagatgtgtatgttcatgtaaccatcacaaagaacaagatagagaacattcctagtacctcttacagttctttctttttttagatacagggtcttgctcttttgcccaggcaggagggtagtggtgccatcatagctcacttcagtcttgaactcctgggctcaagtgatcttcccatcttagcctcctgaggaactaggactgactataggcacatacaggaatggggacttgctgtgttgtgtaggctggtcttgaactcctggccttaagccactctcctgctttggcctcccaaagtgctgggattacaggcatgagacaccatgtctgactgtcttccttcttaaaatttgtattttactggttgttctttcttactgcttttaacagtaggtgtctctcaacacaatgctcttctctgtctccctctcttcctgctgcctccctaactccatcctttatacccaattgcctgacggagataatctttttttatttttatatttttttgagacagagtctcactctgtcacccaggctggagtgcaggggcacaatcatggctcactgcaaccttgacctccccaagttcaggtgatcctcccccctcagcctccctagtacctgggactacaggtgcccaccattacacctggctaatttttttattttttgtagagatggggtttcgtcatgttccccaggctggtctcgaactcctgggctcaagcagtccgcctgccttggcctcccaaagtgctgggattacaggcatgagccacaatgcccaactgaggtatcttactctttttgaagacacgttggggtgaacatatctaaattgaactcatcttcttaatcttttgcaaaagtttctccttatttacctacctatttcaatgttaataacatgttttgtttagttttgtttctgaggcagagtctggctctgtcacccaggctgctggagtgcagtggcatgcgctgcagcctcgaactcttgggcttaagtgatcctcttgcctcagcctcccaaatagctggaactgcaggagcatgctgccattcattcctgaccaatgttttgattttttgtagagattttctagattctgtgccaggatacagaaatgagtcagacttgatccttccctagccttgccatattgcctaggctggtctcaaactcctgagctcaagtgatactcctgcctcagcctcccaaagtggtggtattacaggtgtgtgccactgcacctggccataaggttttttttttttttttttgagacacaggatcttgctgtgtcccccagggctggagtgcagtggcgcaatctcagcacaccccaacgtctgcctccggggctcaagctatcctctcacctcagcctcccaagtagatgggactacaggagtgtgccaccacacctggctaattttttagagatggggtttcgccgtgttgcccaggcaggtctcaaactcctgacctcgagtgatccgcttgctttggcctcccaaactgttgagattacaggcatgagccactgcgcctggcccataacgttttttcaatcaattttaccaagctttaatttatttgcaataatttcacaaatttttaatgtacagatcagtggctgtaacaatcactttaataatagagtaatttttacttccccccaaaatttcctaggcccctttgcagtctcttttcagtcttattcctgtgcagccgctgatgtgatttctttcttttttttttatttttttggagatggagtctcactgtgtcacctaggctggaatgcagtggcacagtcttcgctcactgcaacctccacctcctgggttcaagcaattctcctgcctcagcctcccaagtagctgggattacaggtgcatgccaccacgcctggctaattttttgtattttagtagagacggggtttcactgtattgcccaggctggtctcgaactcctgaactcaggcagtccacccgcctcagcctcccaagatgctgggattacaggcatgagccatcacaccaggcctctgatgtgatttctattgctgtatatgagattagtcttttctagagtttcatagaaatggaattatacagtatgaaattttgtgttttgcttctttctcttggcataatagctgtgatatttatctatgttgcgtgtttcattagttcatttctttttattgcttagtaatagtccagtgtttggatatatcactgtttatgttcacctgttgattgataattgaattatttccagtttttggctattatgaataagattgctagcaatatttgtatataagcctttttatggacatatatatatatatatatatatatatttttttttttttttttttgagatggagtctcactctgttgcccaggctggagtgcagtggtgaaatctcggctcactgcaagctccgcctcccaggttcatgccattctcctgcctcagcctctcgagtagctgggactacaggcgtccgcaccatatctggctaattttttgtatttttagtagagatggggtttcaccatgttagtcaggatggtctcgatttcctgaccttgtgatccccccgcctcagcctcccaaagtgctgggattacaggcgtgagccaccgcacccagcctatggacgtgtatttttatttctactaaccctaagtcttctaaattagaaactttgggattatttttgatttgtttaatctcttttctcacctatattcacacaataggttatgaagtcgtgggatttcttcttttgaaatgtgtttcattctttgttctcttttccaagtatctgtaacattcttgtgagagggtgtatgtgtgtgtgtagccttattttaggagtaggggatgtaaggatgattgtgcagatgatatatttgctcagtgaggtttaaagtcaggtggggatgctgacattgaatttataggatggggaaaagggctattgctgttggaagcactctatctgtaaaagtatcattttagtccctgttttgttctagtcttattattgttgctatttttagtttgtttttgttctgttatgtattcacggatatgtatgtggtgtaaagtggtgaaaaagtttatcgtcatggatgttctcattgctgtgtgagcgggcaaagcacttaatctctgggcctcagttcattgtctgtaaaatgggaataataatactttccacatagtgttaaaaggattagatgcattgttacatgtatagctcttagttttgtttttgttttttgagacggagtttcgctcttgttgcctaagctggagcacaatggcatgatcttggctcaccacaacctctgcctcccaggttcaagcgattctccttcctcacactcccgagtagctgggattacaggcatgcaccaccacgcctggctaatttttttgtatttttagcagaaacggggtttcactatgttagccaggctggtcttgaacccctgacctcaggtgatccgcccgcctcggcctcccaaagtgctgggataacaggcgcgagccaccacaactggcctatatgtatagatcttagaatagtacctggcatattgtgttacatatgtgttagctagggttttttgttttttttttttttggtttttttttttgtttgagatggagtcttgctctgtcgcccaggctggagtgcagtggcgtgatctcggctcactgctgcaacctctgcctcctgggttcaagcgattctcctgcctcagcttcccaagtagctagaattacaggcgcccaccaccacgcctggctaacgtattttttttagtagagacggggtttcaccatgttggccagactggtcttgaactcctgacctcaggtgatccacccgccttggcctccccaagtgctgtgattacaggtgtgagccactgcactcggccagctagtactattatcttaattctactttacttaaaaggctgtctttttctctcccatttcagttccccttacatattggtataagacttatctccttatgtaatatctgattttttacttctacaaacctacagaagtactttctttttactgtttttttttttttttttttttgagacggagtctcgctctgtcgcccaggctggagtgcagtggcgggatctcggctcactgcaagctccgccttccgggttcacgccattctcctgcctcagcctcccaagtagctgggactacaggcgcccgccactacgcccggctaattttttgtatttttagtagagacggggtttcaccgttttagccgggatggtctcgatctcctgacttcgtgatccgcccgcctcggcctcccaaagtgctgggattacaggcgtgagccaccgcgcccggccttctttttactgtttttttgagacagaatctcactctgttgtccaggctggagtgcaatggtaggatctcagcttactgcaacctctgcctcccacgttcaagcaattctcctgcctcagcctcccaagtagctggaactacaggcacacaccgccatgcctggctaattttttttttttgtggtagcgatggtgtttcaccgtgttggtcaagctggtctcaaactcctgacctcaagtaatccacctgcctctgccacccaaagtgctgggattacaggcgagagccactgtgcctggcctacagaagtactttctatatcataatctggcaaccatttgtgtgtatttttttcagttgtgatgtacaaacaataaagtgcttaagtgaattttttttttaaccaatgtatctactaagattaagttatggaaagtttccagcattcttgaaggctccctcgtgtcccttctcccttaataaccaatcctccatatctgttctgactctttaccataaataatttttgcatgtaattgtttttattgttttttaagattatctttgattgacccctccatatctatgcagcttgcttttccttccttccttccttctttccttccttccttcctctctctctctctttctctctctctttctttttttgaaacaggatctcactctgtcacccaggctggagtgctgttgtgcaatctcagctcactgcaacctccatctcccaggttcaagcgattctcctgcctcggcctcccgagtagctgggactacaggcatgcgccaccatgcctggctaatttttgtatttttagtaaagacggggtttcaccatgttgaccaggttggtctcgaactcctgacctcaagtgatccgcctgccttggcctgccaaagtggtgggattacaggtgtgagcccccatgcccagccgatacagcctatttctgattactgcccagcacactttgcctatgtttatgatgtctcttttagtgcccttttggtctcatctcttctttttctctgtccattcaagtcctcttccatgaagttgtccccaactgcttcagcttatactgtccttgttcttctctaagttctttttggctcatttatcagtgtcccagtttagtacttaatgagatattttcctttttttgtaagtacttaattgtcttagcttttactaggactatggttattttgtgtccctcccatttaatgcctagcataggacatacagtactaattgttgaatagaatctaattgaatttttaaagtttaagttctttaagtgttggatagcagctagcagttataatagagaatttggcagtgaactagggcaactatttatacaacgaaagtaaaaagcacagcatagcttcatgaacccatataaatgttgatgctattccactgtattagaccgtagtagaatcagaaatgctgaacccatgggaattgcttgtgtgagtcttgcacgggaattgcacagtaggtctttgaactttctgaggttgtgtacaaatttggtatgaatatgcacatgtgcatttttctagggtaagaattcatatcttaattgggtcttcaaaagtatctgtggctaaaaacattaagatcctgtggtctagcaaaaaatgtcattttacggatgagacaactgagactcagaattaagacacaagaggaatggcttactcatagtcattgttatacatagtggtgatcctgagtcaacaggaaatattaattaggttcaatgtggtctgccttataaaaagggaaataagactccatggaagtgtctaaatacagttaggaaatatttccatcccaaatagctaaacttaaaagaattgaggtgaaatgcacataacataaaattaatcattttaggccgggtatggtggctcatgcctgtaagcccagcactttgggaggctgagaccggtggattgtttgagctcaggagttcagaccagcttgggcaacatgacaaaatcctgtctctacaaaaagtacaaaaattagctgggcatggtggcatgtgtctgtagtcccagctgcttgggaagcagaggtgggaggatcacttgagtccaggaggcggaggttgtagtgagtggagatcacgccactgcactccagcctgggtgacagagtgagaccctgtctcaaaaaacaaaaacaacaacaaaaataaccattttaaagtaaacagttcagtggcatttagtacattcacagtgttgtatagctactgtatgtatgttccaaagcattttccttaaccctcaagcaaaccctgcacccatttattatagcagttgctcgctattttcctctcttccgtctctgataatcaccagtctttgttctgtgtctatggatttggatttgcctattctggatacttcataaaaaaggaatcgtacaatatttgaccttttgtttctggcttctttttttttttttttttttttgagatggagttgctctatcgcccaggctggagtgcagtggcatgatcttggctcactgcaaactctgcctccggggttcacgccattctcctgcctcagcctccctagtagctgggactataggcgcctgccacaaagcccagctaatttttttgtatttttagtagagacggggtttcactgtgttagccaggatggtctgaatctcctgacctcgtgatccgcctgcctcagcctcccaaagtgctgggattacaggcgtgagccaccacgcccagcctgtttctagcttcttttacttagcatagtgtttttggagcttcatccatggtggagcatgtatcagtacttcacattattatttgatacggagtcttgctcggtcgcctaggctggagtgcaagtggcatgatcccagctcactgcaacctccacctcctgggttcaaatgattctcctgcctcagcctcctgagtagctgggattacaggcacacgccactgtgcctggctaatttttgtatttttagtagaaatggggtttcaccatgttggccgggctggtcttgaactcctgacctcaagtgatccacccgccttggcctcccaaagtgctgggattacaggcgtgaaccactgtgtccagcccaatactttatttatttatttatttgagatggagtctcactctgtcaccgaggctggagtgtggtggcacaatctcggctcattgcaacctccgcctcccgggttcaagcgattctcctgcctcagcctcctaagtagttgggactacaagcacgcaccaccatgcccagctattatttttgtatttttaatagagacggggtttcaccatgacggccaagctagttttgaacttctgacctcaagtgatccgcccgccttggcctcccaaagtgctaggattacaggcgtgagccaccgcaccctgcctactttatttttgtttatggctgaataatattccattatatttatgtaccagagtttgttttcccattgatttgtcgatggacatgtgagccattttataccttttttttgctcgggggtggaggaacggaatttcgctctgttgcccaggttggagtgcagtggcgcaatcttgacctaggctcactgcaacctccgcctcccaggttcaagcgattctcctgcctcagcctcccaaatagctgggattacaggtgcgtgctaccacaccaagataattttgatatttttagtagagacggggtttcgtcatgttccctgggctggtctgaactcctgagctcaagcgatccacctgcctcaggctccagagtgctgggattacaggcggtgagccaccgcgcccagctgttttatactttttggctactatgaatggtgctaatgtgaacatatttgtacattaatatgtactgttttcagttcttttggatgtatacctagaagtgaaattgttgggtcacatgataattatgtgtttaactttttaaggaaacggccacctattttccatagttgctgaaccattttacattaccaccaaaaatatatgaaggttccagtttctccacatcctctccaacaattatttcccgttaaaaaaattttatagccatccttgagtgtgaaatggtacttctttgtagttttgatttgcatttccctggtgactaatgatgttgagcatcttttcgtgcactcagccatttgtttatcttctatggaaaaatataaaataaacttctaattctcaaagaggtctgcttcagttagcaagaaaagtctttgaagatgtaaagtatttggtgtttctgtataattaagtgccaaactggtacaaatataaaatactgtggtaattaaaaagagaagatatggtgaaactggtttaaattttgaaagcaagtgtttaagaacccgtctaccattatgtacagttataaactgtaatgcagataaattgattggaggtttttcttgcttcaaatattcgcatattgccctttgacttggcattgaaagatgtctattcaattttctgcattaaaaaagaacagttttgctggggcgtggtgcctcatgcctgtaatcctagcacttggggaggctgaggcaggcggatcacctgaggtcaggagttcgagaccagcctggccaacatgacgaaaccccatctctactaaaaatagaaaaaattagccgggcatggtggcgggcacctgtaatccaagctactggggaggctgaagcaggagaatcgctggaacccaggagacagaggttgcagtgagctgagattgcaccactgcactccagtctgagtgacacagtgagactccgtttcaaaaaataaaaaagattatgtatagggattttattgcaacattatttatttttatttttattggatagatttagaagtctgatactttttttgctcttcttcatttcaacgcatagagagaaatagtcacctggaagattcacagtacccattagatttaatgggaaaaaaagctagtcttaagacttctcaaagagaagtcttagagaaattaattggatcatcggaaaaggggcagttatacattggaaatgtatacaacaaattaaatattacattatttaattaaatattacattaattaaataatacaacaaattaaatagaacacattgagtggcttctttccttattgcaagccgaaactatgtatttgccatcttttaggcttgtttaattttaaaactttgctgagtaaaatatttttaagtaaaacttgagattttagttttcctccttggaattgtattcagtgtcatgtttgatactaccgtagagaggcaaaatttgaactcattaattttctaaaaggggtaatcatcttcagggcagggttatcttttattcttttatatcttttagtttatttagtcaatatttgttaaatgcaattacaatcaagtttttatcatattttcccatcccgcttcattatttctcaacccagcatcaaggacagtgccagggatatggtaaaggtctggtaaatattgaatgaattatccttattttagtttaccagttttttttttttgttgttgttgttttgagatggagtctcactctgtcgtccaggcgggagtgcagtggcactttctcggctcactgcaacctccatctcctgggttcaagcaattctgcctgcctcagcctcctgagtagctgggattacaggcgtctgctaccatgcctggctaatttatgtattttttattagtaaggggttttgccatgttggccagcctggtcttaaactgctgatctcaggtgatccacctgcctcagcctccctaagtgctgggattacaggcgtgagccaccgcgcccagccccttccctccatttttaagttgggttgtttgttttcttattgtttagtttttaattccttatgtattcaggataagcccttattagatgtaggttttgcagatacgtttttttcgttcatggctttttgtttctttccacaaaagtttattcttaaatgtacaacaggctccattacaacacttcagtccagctatagttggcaaaagatgttatagtagggaatgaaatcaagggtcaccattgcctcaggcccatggaacagcttactttttgccagatttcttaattccacctgtggccaggggccccttccctatagtttcttctggtcctctttttgtgtctacttgaaagccttgccttccttgtatatctccttggcctgctttctgggctgtttcaggggtttcttcttgccatctttgtggctggacatggcacctgccgccctttccccagaccctgccactggaaacccagttacggcttttaaaattttttcttaatggtatctttcacagagcagaagtttttaattttgataaactctagttctttgattctctctcttctctctctttctttttctttcacagcgtcttactctgtcaccaaggctgcagtagagtggcgtgatcatagctcactgcagcctcgacttcccaggctccagtgatccttctacttcagcatcccaagtagctgggatcacaggcgcacaccaccacacccagctaatttttgtatttttagtagagacggggtttcgccatgttgcccaggctggtctgaactcctgagctgaagcaatccatctgcctcaggctcccaaagtgctgggattacaggcatgagccactgtgcccagcttcttcgttttgtttcgagacaggatcttgctctgttgccgaagctaaagtgcagtggtgtgattatagctcactgaaacctcagactcctgggctcaagtgatcctcacatctcagactccttagtagctaggactgcaggcacatgccaccgtgcctggctaatttttaaactttttttattttttatttttattttttgtagaaatagggtcttgcatgttacccaagctggtctccaactcctgacctcaagtgatcctcccaccttggcctctcaaagtgctgggattacaggtgtgagccactgcacccagcctatcatagctttatatagtcattccttggtatctgtgtgggattggttccaggacccctgtggatacaatccatgaatgcctaagtcacttatataagatgatgtagtatttgcatataacctacatacatcttcctgtatactttaaatcttctgtagattacttataatactaaatgcattccctacacatcacttcattcttctggattcactgtactacttggtgcatggcaaattcaagttttgctttttggaactttgtggaattgtttttttctgaatatttttaatccgaggttgactgaatccaggaacgtggaactaaggatacagggggctgactatagtaagttttagcatcaattagagttcttcacgtttattcttttattcaagttgttttggctattctgggtgctttgctttttttttttttttttatgtatgttttagaatcagtttgtcagtttcttcaaaaaaggctgctggttttttgggattttgttgaatctttggatcattagtgggaccattgatatcctgacaatactgagtctcccagtctatgaatttagtacatttcttcatttattcgggtctttttcttacttttctcatcagtgttttgtaattttcagcatacaaatcgtgcacacatttgttagatttatctctaagtattctgtaaatttttttttttctttttgagatggagtttcacgcttattgaccaggctggagtgcaatggcatgctctcggctcaccgcaacctccgcctcctgggttcaagcgattctcctgcctcagcctccccagtagctgggattacaggcatgtgccaccacacccgactaattttgtatttttaatagagacggggtttctccttgttggtcaggctggtctcgaactcccgacatcaattgatccacccgcctcggcctcccaaagtgctgggaatgtgagccactgcgcccggcagtattttttttttttttttgagatgtaatctctctctctgttgtctaggctggagtgcagtggtgtgatcaaggctcactgctgcattcatctcccaggctcaagcgattctccacctcaacctcctaaatagctgggaccacaggcacacaccaccacgcctggctaatttgttttgatttttagtagagatgaggtcttgctgtgttacccaggatggttttgaactcctgagctcaagcgatcctcccacttcagcctcccaaagtgctggaagtataggcatgtgccactgagctcagccatgatttttaattttattgaaaatgttatctcccccctccaccaaatttcagtttcattatgagtatgtaaacataaaattgtttttttgtttgtttgttttttgagacagggtctcactctgttgcccaagctcgagtgcagtgacagaatcttggttcactgcagcctcaacctcccgggctcaattgatcctcccacctcagtctcccaagtagctgggactacaagtgttgctgcaacacctggctaattttttttttttttcttgagatagggtctcactttgtcacccaggctggggtacagtggtgtgacctcagcttactgcaacctctgcctcctgggctcaagcagtcctccctcctcagcctcccaagtagctgggactacaggtgcatgccacgacgcctggcttaattttttatttttttagagatggtttctgcatgttgcccaggctggccacagactcaagcaattcacccgcctcggcctcccaaagtgctgggattacaagaatgagccacagtgccgaccataattgatttttttgatattgactttgtattctgcaaccttgataaattcacttatttctggtagctattttgtggactgggattttctgtgtacacaattacgtttattagtacagttttatttcttccttgccagtctgaatgcctttttttttcttcttgccttgttgcactggctagctcctaaagtacagtgtgagggtggatatccttgtcttattccctatcttatgaggaaaatacttaatctgtttttttttttttttttgagacgaagtttcgctcttgttgcccaggctagagtgcaatggcacgatctcgggtcactgcaacctccgcctcccgggttcaagtgactctgctgcttcagcctcccgagtagctgggattacaggcatgcgccagcatgcctggctaattttgtatttttagtagagacagggtttctccatgttggccaggctggtcctgaactcctgacctcatgatccgcctgcctgtaatcccaaagtgctaggattacaggtgtgagccaccgcgcccagccggaaaatacttaatcttttatcattgcatgtgatattagctatagggattttttgtttttctttttgaggcagtgtctcgctctgtcatctaggctggagtgcagtggctcagtctcagctcattgcaacctctgcctcccaggttcaagtgattcttctgcctcagtttcccaagtagctgagattacaggcacccatcaccacgcccagctaattagtgtattttttgtagagacaggttttccccatgttggcccagatggtctcagtctcctcgaccttgtgatccgcccgccttggcctcccggagtgctgggattacaggcgtgagccaccgcatccagccggttatacatttttagactaataaagtgaattatatggattgatttttactcctgagaggaatcccacttgatgatgttatattctttttataaactgccagcatctatttgtaaatgttttgttgcaatttttacattatatctgtttgagatactggtttatagttttcttgttgatatctggttttggtatcatggtaatgttgacctcataagttgataaatgtttatatgctggaagagtttatgtagaactggtattattttttcttagatatttgatagaatttccctgtgaaaccatctgggcctagagttttctctaggcaaggcttttaattatgaattatattactttagtggaaacagtaagttaggttatctttttttgtttgtctcgctgtgttcacccaggctggagtgtagtggtgccatcacagcccacagaagccttgacctcctgggttcaagtgatcctcttgcatcagcctcccaagtagctggaaccacatgcacatgccaccacacccagccagttaaaaaatttttggggggtagagattgggttttggcatgttgcccaggctggtctcaaactcctgggctcaagtgatcctcgccactcggcttcctatagtgctaggattacaggtgtgagccactgtgctatcctctatttatcctttttttttgagtcttgctgtgtcacccaggctggagtgcagtggcacgatctcggctcactgcaagctccatctcccgggttcacgccattctcctgcctcagcctcccgagtagctgggactacaggcgcctgctaccacgcccagctaattttttgtatttttagtagagacagggtttcactgtgttagccaggatggtctcaatctcctgacctcgtgatccacccgcctcggcctcccaaagtgctgggattacaggcatgagccaccacgcccggcctatccttttttttaatttattttttgagatggagtctcgctctgtcgcccaggctggagtgcagtggcgcagtctcggctcgctgccatccccaactcctgggtttaagcgattctcctgcctcagcctcctgagtagctggaactacaggcacgagccaccacacccagctaatttttttttttttttgtatttttagtagagactgcgtttcatcatgttggccaggctggtctcaaactcctgaccatcctcaggtgatccgcccgcctcagcctcccaaagtgctggcattacaggcgtgagccactgctcccggcccctctatttttgaatgaacttcgatagtttatgttttttcagagactctccatttcatgggagttatcagattaactggtaaaattacttataataatcccatatttttattttaatgttgatagcgtctgtagtggtatcacctctttaattcctgatactggtaatttgtttcttctttctctttggcattagtttgtctacagagttacctagctagctttgaggatgggcgtgctactgcacgcctataatcccagcactttgggaagcagaggtgggtgaatcacgaggtcaggagttcgagaccagcttgaccaacatagtgaaacccccgtctctactaaacatgcaaaaattaaccgggcgtggtggcaggtgcctgtaatcctagctactcaggaggctgaggcatgagaatcacttcaatctgggaggcaaaggttgcagtgagttgagatcgcctcattgcactctagcctgggtgacagagcaagacaccgtttcaacgacaacaacaaaaatctagctgttggtgtcattgacttttctttattggtttcttttttttcccccattttttttttttttactttggctcattatttccttttgctgtgttgtatttaatttgctcttccttttttttttttttaagtttcttaatctggatgcttatattttggtactaaatctttcttcttttctttttttttttttgagacagagtctccctctgtctcccaggctggagtgcagtggcgcgatcttggctcactgcaagctccacctcctgggttcacgccattctgctcagcctcctgagtagctgggactacaggtgcccgccaccacgcccggctaatttttttctattttttagtagagacggggtttcaccgtgttagccaggatggtctcgatctcctgacctcatgatccacctgcctcggcctcccaaagtgctgggattacaggcgtgagccactgcgcccagcctcttctaatataaggatttaatgttataagattttcctgtgtccctgtatttcaattcagaatattttccaatttcacttttatatttctctatgacaaaccatgtgtatttagaagtgtgttgtttaatttttaaatatttaggaattttcttgatatttttctgatttttgatttctgatttaattctgtgtggtcggaaaacatactgtctgaatttaattctttatttattaaaacttgtttcaggctggggcgtggtggctcacacctgtaatcccagcactttggggggcagaagcaggcggattgtttgaggtcaggagttcgagaccagcctgcccaacatggcgaaaccccgtctccactaaaaatacaaaaaattagccaggcgtggtagtggacgcctgtaatcccagctactctggaggctgaggcagaagaattgcttgaacccgggaggcggaggttgcagtgagccaagattgtgccactgcactccagcctgggcgacagagtgagaccctgtctcaaaaaaaaaaaaaaaaaagcaaacttgtttcatggcccagtatatggtgtattttggttgttctgtacatacttgagaagaatgtgtattcttgatttgttgtgtatagtgttctataaatgagaattaggtcaagttagcactttgggaggccgagacgggcagatcacaagggcaggagatcgagaccatcctggctaacacggtgaaacctcgtctttactaaaaatacaaaaaaattagccaggcatggtggcgggtgcctgtagtcccagctacttgggaggctgaggcaggagaatagcgtgaacctgggaggcggagcttggagtgacccaagatcccgccactgcactccagccttggcaacagagcgagactccctctcaaaaaaaaaaaaaaaaaaaaaagacaaatagagacacggtaacatttgctaaggaaagaagacaaatactgggcagagaaataggaagactcatccacttctccttggttgctaaagtatagaagttgggtgacctacatatctttctttggaagttgtgcttatcagaaaaaaggaggtcaatagtaggagatgcctatttttgtgtcatgtattagattacttgtcagaagttttctttgttgactgctgacctttagtttctctttttgctgtttagaaaatagtttgaagttttgtacaacttaacataagtttaaaattttttttaatggaatgtttcatgaatttgtatgtcatccttgctcagcagccaggctaatctctgtattgttccaggtttttagtatatgtgctgctgaagtgagcacatgtaagtttcttttggaatattttaacaattttggggggattgtcatttttcattatagattatatacaaaatgtattactctacctgtgctaaagattaatgtgctattgagatatactactttgtctccattataacaaccagatagttagaagtaaaattatttaaaagttagaccattaaatttattagtaaatacttattggttttggttttttgaggtagaatctcactctgtctcccaggctggagtgcagtggcacgatcccggctcactgtaaccaccacctcccaggttcaagggattctcctgcctcagctttcccagtagctgggattacagacacacaccaccatgcccggctaatttttttcttatttttagtagagatggggttttaacatgttggccaggctggtctcaaactcctgacttcaaatgattctcctgccttggcctcccaaagtgctgggattgcaggtgggagccactgtgtccggcccatttttgttcactttaaaacttataccaggcttggtggctcctgcctgtaatcccagcattttgggaggccgagccgggtggacagcttgagttcacgagtttgagaccagcctgggcagcatggcgataccccatctgtacaaaaaatataaaaattagctgagtaaggtggtgtgtgcctgtagtcccagctactcgggaggctgaggtaggaggatggcttgagcctgggagagctgagattacaccactgcattccagcctgggtggtagagccagatcttgtcaaaaatgaaaaacaaacaaacaaacaaaaaaaccaaactttttactttagtaagggagatattgaaagatgataaattatgtttgaaaatatcattcttgtaatctaagatcaagtgaaattagattctgttaaaattgataggtaatttaaatattgtaaaatttctcttattttaatgcattttacataagaatgaatcaggttttttttgtttgttttgttttgttttgtttttgagacggagtctcgctctgtcgcccaggctggagtgcagtggcgcgatctcggctcactgcaagctccgccttctgggttcacgccattctcctgcctcagcctcccgagtagctggaactacatgcgcccaccaccacgcccagctaattttttgtatttttagtagagacggggtttcactgtgttagccaggatggtctcgatctcctgacctcgtgatccacctgcctcagcctcccaaagtgctgggattacaggcgtgagccaccgcacccggccaagaatgaatcagtttgattcatggttacattgatttggcacctactatgtttaggtgctatgtagtaggtgaaaacgtaatggtgaaaaaatgtgacctgtgtctgcagagagcgtattgttccagggtaggaaatcaatggagaaaataaataattataagctagtatgataagtgcaatatcagagatatttttatattacagaaacacagaagagggttctgaatccaaattagagattagggaagacagtaagtatagtagtctgggaggacatctaggagatagttgctgagccaaaggtagaaaaaaagacattctgagatgcagtaaaaggctagaggaaagagaatatgggaagtatgtgtggctctaagccaggggcatctgtcaaaggggcgagtgaggactgaaattcggtctgtgctctgctatccattatccatgtcttgtgcttatggagttgcatatccttaaaaggagtccctttttcaaatttcttcaaaggttcagtagcttaagaggccctcatttgtgggaccagctgttggtacattgtatgatttgttatggattttgaatttgattttctatgcctgttattctctaacttagatctgagcaacttcagggtgttttggagtggcatcctggtgagattaaggaaacgcctaaataacttcttatattttccttgaatattttatagtagagcaaaatagattatatgctagagctaagctgtccaatatggtgacccctagctaccataaatttaagttaaacttaataaaaattaaataaaattcagtttcttagttgcaccaactacatttcaagtggaattggatgagaattgatatactagggaacaatgaaatagattcggaagggtgggtaggatttgtaggcagacatgggggttttgtggatagcattccaagtggagagaataacattaatgaatgtaatgccattggtggaaaataagtttagaaatgtagtttggaccaaaatggggagaaccctgaaaacttaacctggagaagattatataatattgagaacttgtaggttaaagtttttgagcaggaagattgagtaattctttagaagtgctttagagatcttggctaggtgcggtggctcacgcctgtaatcctagcactttgggaggctaaggcgggtggatcacttgaggtcaggagtttcagaccagtctggccaacatggtgaaaccctgtctttaccaaaaaatacaacaattagccaggtgtggtggtgcacgcctgtagtcccagctacttgggaggctgacacagggggatcgctttgaactccgtctcaaaaaaaaaaaaaaaaagaaagaaatgctttagagatcttatttgagttaggagtgatgtatctgttagggtttttggaagcagagaagtgataccaactatcttaagaattttcttggccaggcgtagtggctcacgcctgtaatcccagcactttgggaagccaaggtgggcagatcacttgaggtcaaaagttccataccagcctggccaacatggtgaaaccttgtctccactaaaaatacaaaaattagctgggcgtggtggtggacgcctgtaatcacagctgctcaggaggttgaggcacgagaattgtttgaatccgggggcggaggttgcagtgagccgagattgcgccactgcactccagcctgggcaacagcgtgagactctgtctcaaaaaaaaaaaaaaaaaagaagaataattttattataagactattaagttgctcgcagactgaaaaggaaggctgaagagagtctaggatagctcctggggtcttgatacaaggaatgaatagacagtttcatcaggatgccacccaaatgaataagtgccaaccgtttttttccagacttgtatcatttgttcaagattcagaatttccaaaaaccaagtacatgtttcctagaggggaatacctaggcagaggagaggtaatatctcaaaaggaaatctaagaccattactaaaacatcctcatagatgttgggaggctgagcaagaagctgttctttacaggtgtacagaatggactaaagagaataagactagagattggaatgcttgagaggtgttttgctgtagaacagacaagaggtaacagagacctaaacaaaaagtagtggcagtgggattggcagtgagggttttgatgtgaaaaatgccatagaggtagaatctgtaaaatttagtaacaaatacttctttttaaatacacagatgactgtagagtgcctagatagcctagagaaagttgatgatgaggtatggaaatctggctctgttacttagtagctatatgatagtgagcaaattacttacattctttgaacttcaagtataatttgaggtggtaattattttaaaacagttgtgagagttatatatatatttttattttttgagacaagatctggctgttactcaggctggagtgcagtgggttaactgcagcctctacctcctgagcttgggggatcctcccacctcagcctcccaagtcgctgggactgcagttgcgcaccacaacacctgactaaatttttttttttttttctgtagagacagggttccaccatgttgcccaggcttgtctcgaactcctaggctcaagtgatcctctcctctgccctcgacctcccagagtgctgggattacaggtgtgagccactgcgcccaccccagttatgagaattaaataagcaaaatgcctggaatatagcgagaagtcaatgagtgttaattcccttccctattaaacagaaaaatagagaatttttgattatttttttgtttgagggtgctgcaggcaggtgctatagtttgttatctctgtatacttggttttagaacttaatgcctttctaggtgggtattcttatggaagcagatgggaagtattctggattagaaatcagtttcagctttagaattttaaaataagccttttgtttttacttaataatttcagatgtacagaaaaagtgcaaagaagatagtacagagttcttgtatacctttcatctactttcctctgattttttttttcttttctttgtttttttggagagtctcactctgtcccccacactgggggacactacaccctccatctcctgggttcaggtgattcttgtgtctcagcctcccaagtagctggattacaggtgcacgccaccaggaccggctaatttttgtattttttagtagagacagtgtttcaccatgttggccagactggtctcaaatgcttgacctcaagtgatccggctacctcagcctcccaaaatgctgggactacaggtgtgagccaccatgcccggcctttcctctaatgttaacattttaaataaccatggtacatttgtcaatgctaacaagttaacattgttacaatattattaactaaactaccaattttgtccagattttccactaacatccttttcctgtttcaggatctaatttaggataccaccttgtatttagtacctttaggttttttagttatagttttgttattaactgtgactttaagcacaccacccaacccttcaggcacttgtgcatctaagataccttttatctctgaagttttgagtttgtttaatatctgtcatacagtgtgccctatttttattttgaaataaataagactataagatctaatcaatacaactgatcttgttgacagtaaaatttaatttttatcttgtaattttactttagtattaaaggaaaactataataatgttgaattttgggaaaaatcacaagagctttttcttccatttgaatcaaaaagataaaaagagagggcttgtatttttgtcaccagtagagggtcatgactccaggttcttggcgttttggacaaagaattggttaaaatgtccagcaaagcaaagaaagaatgaagtaacaaaagaacgaaagcagggatttattgaaaatgaaagtacactccacagtgtgggagcagacctgaggagcggctcaaggagcccaggtgtagaatcttcttgggttcaaataccccctagaagtttcccattggccacttcatgctcacctcatgtaactgaagggtagcctgcaatcagtctgattggttggggaaagcagcccaccagaggctgatgtgaagttacaaaggtcacactcctgtgcaaacatccgattggttgcaaaaactttgtaacttcgcatctgcaaaaagcaaccaatcagaggctagggtgaagttacaaagttgcaaacgaagactccaccagcaatcagtctgatttgctggggacagccaatatcccatctgcagtgctcaggaaaggtcaaagggagtcgcctctggtccttttgttacttaggcatggaaagttagggttttcctttcaatttagttctaggaaattggcatgaaacagccttaggttccctgcctccagaccctattctcctgcctcatcttcctctgagagacatgatccccataaatctttatgggaggcagaaggactgaaggtctttcttctgtaactgcttcatgctgatttggggcttagtccctacctgttggagatcacggaactctcaccctgttctgtctagtggaaggagggtagctttttgatggccaggggtagtatcttcacctggaactggctggaactttgctgcatgatcatctgaagtttggtggtctctaggcgaggggaaatgaaattgattaaaagacttaatgggaattttgggagtggatacctatgctgttatagaaatttgctggagaaaaaacaaaacctgctctgttctagaatctgtgtgtttccttaaagtcttagcacaagtgattccattttggtttggtttgttggggcccagtgcatgagcttagtccaaaacaatgacctcccagaattttgtttaaaaaaactccccctttttggtcaggttctcacttaggtgagagtgcttgcgctctggagtttgaggccagcctgggcaacataacaagactttgtctctactaaaaagaaaacatattagttgagcatggtggtgtgtgcctgtagtctcagctgcttgggaggctaaggtgggaggatcacttgagctcaggaaatcaaggctgcagtgagctgtgcttgtgttactgcactccaacccgggcaacggagcgagaccctgtctctaaataaataaattaaaaaaaaaccttaggtttttggattactaaattggatacattagtgtgacacactttaattttataggcaactcagaaagaagattggcttgaatgactagattattttgagttagaaatttctttgagatattgaagtggagacatacggttttataagtaaataaatgtaaataagtataagttaaatttttttttttgagacagagttttgctcttgtcacccaggctggagtgcaatggcgcgatctcagctcactgcaacctccgcctccttggttcaagcaattctgcctcagcctcccaagtagctgggattacaggtgcccaccaccatgcctggctaatttttttttttttttttttttgagatggagtctcactctgttgcccaggctggattgcagtggtgcgatctcggctcactgcaacctctgactcccgggttcaagcgattctcctacctcagcctcctgagtaactaggactacaggcgtgagccaccacaccctgctaatttttgtactttttagtagagatgggtgccgagaccagctccgtgtgcggagaccagctcggttgtggagatcctaacccagcgttgctagaggaattaaagacacacacacagaaatataaagtgtggagtgggaaatcagggggctgacagccttcagagctgagagcctcaaacagagttttacccacatatttattgacagcaagccagtgataagcattgtttctatagattatagattaactaaaatgggaaacaaagggatgggccaaaacaaaggtatgggccctggctagttatctgcagcaggagcatgtccttaaggcacagatcactcatggtattgtttgtggcttaggaccgccttaagcagttttccatcctgggtgggccaggtgttccttgccctcatttcggtaaacccacaaccttcggcgtgggcatcatggccatcacaaacatgtcgcagtgctgcagagattttgtttatggccagttttggggccagtttatggccagatttggaggcctgttcccaacagatggggtttcaccatattggacaggctggtctcaaactcctgacctcgtgatccacccatctcggcctcccaaagtgctgggattacaggcgtgagccactgtgcccggcctgcctggctaatttttgtattttttagtagagatggggtttcaccatgttgaccaggctggtcttgaactcctaacctcaggtgatccacccaccttggcctcccaaagtgctgggattacaggcgtgagccaccacacctgtccaaattttttttttttttagagagagacagagttgtgctctgtctctcagatcatagcttactgcaaccttaaactcctgtgctcaagggatccttctgccttagcctcctgagtagttaggactgcaggtgtttgccaccacacctggctaatttttaaagtttttgtagagacagtgtcttgcaatgttgcctaggccagtcttgaattcctgggctcaagcagtcctcctgcctcggccttcgtaagtgttgggattataggcatgagccactgagtctccagggccttaccatagttatctttttgaattactagtaatgcaagagaatgtaagtagagtttgagtctcagttatagggctaataaaagaatgtagccaggtgcagtggctcacgcttgtgagccagcactttgggaggccaagccgggtggattacgaggtcaggagttcaagaccagcctggccaacatggtgaaaccctgtctctactaaaaatacaaaaattagctggacgtggtggcgggcatctgtaatcccagctactcaggaggctgaggcacgagaattgcttgaacccgggagtggatgttgcagtgagccgagatcactgcattccatcctgggtgacagagctagactctgtctcaaaaaaaaaaaaaaaagaatgtaaaaagattcttcactctagaaactaaggcagctctgttagcattgcaggacttttccttagttcagctaaagaacttgtccgtcccatggctatgaaaattcaggcttgcagacagtttaaagggtgagtaaagcagagggttttattgggtgaaaagggaaaaaaaggggaaatagggatactccacaaggccagagtctcctgctagagcacttcccgccctgccattcaaatctcaggttccacacaggaagtggaggggccagactcctccccactgcaaatggcatgaacctcctgaggctcagctccagtgggcaggcttgttgtagtttctctggggaccctctcccacctggctatctcatttcccctctaatctagcaattgttagattaaggacacggacgaagaccgatcttaactgcttcctgctgacaggggcctgttttgggggaaacagcagtcagagctccctaagaggcctatttaggggttcccagcagaaggggccaccatcagaggctccggttgcatgaccatttggagtttgatggcctgaaggcaagaacagacaaaccgggttattagaaaacatgcatcaaaacgaaacaaggggcggggtaaggagagctgaaaaatactgaggccttttaccaattttcacagggagagggaggccaaaaacccgactggtaaagaaactttacccttttgctggcatgttgggcttttgggttcccttcctctgagcccaatcctaagccaaccagtttaaagtttgggaaattaactctttctagttcggaggatgcatttgaggggagtgtcttgtagtacagaaacacaattatctattagtgaagagagaactgaggagaaagggaaaaagcctccttttaaaggagtcccagaggttcaggatgcatttgaaaggggtacagattgaagatgaatggctaccaatctagaaagagggaagcaggcctccctggttcccttattttcctagcatatactcaggatacgtgagagtgagaggaaagagtgtcctctttcagtcttctgtccttgcatccccgagttctggcgaccttggcaggtgccaccatgagtaccaaagtggcttgcacccatgaaacaggggtgtcgagacaataggaattatttgtctcacctatgtctgtttcccacctacagtcagtagctttggagttccctaggcctcatttatgccatggatattaatgtggcctttatccatgaaacaggaagcttggagttggcttaatcagcaggagtcagccacgctcacctgcaatgtgccttttaacctctgttgtcatttgcctctggatccctcagatccagtttttttcctagggctttgacctgaaatttggaattgagtctgggacaaagatgtgtctcaggggagttgcatggactccttgtaagccaaatgctaaggtgaaactgtggaaccgagtcctcctccagtaagggagaggaaaggatgtcttgtgacacacccagataactggtggctctagttatgcttgctaggatttgggtgcatggtgcttggctttggttagctcccttggtcttactttcccaaaaggaaacctctgtgatgggcatcctatgtattcccatcacctggaagaatttgaaggataattgctcagaactagaatattggtccagatttttacattacccatccccgttgttctttctgagatgcagctggagattgctggttagttcacaggaacaagcagggttagtctaaaatgtaggtgaaaacttaaaaacaaccaatgagttcagaatttaatgacaaatgtatggtaaattttggaacatgatctctctctttccagtcctcatttttgttaaaaaatcatgataggactgagtggtttgcaaaatcccttagccctatacttgacctgattatttgcctaaagtatagcaagaataattatgtctacataggccttttagattggctttgatggaactctattccccaaggaatctcagataagaccttgaaacacctatgagttgggtgatcctctcctcttaaggtcccaagataaacttggagctcctagaacctgttagaaagtgacattctttactgaccacaggtcaggaaccctgtacaaggactgcgaagatgagggtattaggtcactttctccatggggcttttgttggttctgcaagttcgacttcgagcttgactccttaaaggggagcatacccttccagtaaaagccttgttaaaataaccattttctccagttgtatcctgttacaaaagaaaaatgaattctcattgcactattgcaaatacttatattgccataagaatactcacagataggcggggtgcggtggctcacgcctgtaatcccagcactttgggaggccaaggcaggcggatcacgaggtcaggagttcgagaccagcctggccaacatggtgaaaccccatctgtactaaaaatacaaaaaattagctgggcgtggtggctggtgcctgtaatcccagctacttgaaaggctgaggcaagggaatcggttgaacccgggaggcagaggttgcattgagttcagattgagccactgcactccagcctgggcaacaagagtgaaactctgtctcaaaaataaataagtaaaaaatgttttaaaaatttaaaaatcaaaaaattaaagaatactcacagacagttttcaaattttagaggcaccaggcggagagaaacataacatgctccaaagtttttttcttaggaatataccttactcaattattaaaggccgtaaatagttcaaaatgagtttccttgactctgaaaaaccaaacaaggatcagcaatattccagccaaaagtcagaaaggttgcttcagctttctgagttcagtccatttagttaactcttgttttgcttgatatttgtaaacatttcagctcttcatgagtcctgttcattttcctttattaaaatgttaacaatctccaaagttatctgaagtctgtatttgagagcacctgttaaagtcttacagtctattataaaccatcttctgaaaaggattaaaacaagacaacaaacatctgtgaatagccaagttgtcagggtaattatagtcagaaacacaattggcaaagaagtttggttatctccatggtttacaataacttaacaaccttaattatgattgatagcaaatacggagacattagaactttagaaatcccatgcaattttggagcatacataagcgttatttactaagatataacctaaagaagattaaacaccattttggcaattccgtgtacctaaacgtgtcacataatcctgtttgcctttcttttccagacacttcaggggccctctgaagtatctgaaaagccatgtgccagggaagaaaattttgaaactgaagtttgattttgggaaggctgctaaatgtttgaggtttaaaacacttgatattataaaataaaatttgagattactgcaagttacttattttgccaaaatgatgactcaaaaagtttaaagaagaaaaaaaccttttttgtttgtttgtttgtttgtttttgatatggaatctggcactgttgcccgggctggagtgcagtggtgtgatcttggctcactgccacctcctcctcctgggttcaagcgattctcctgcctcagcctcccaactagctgggactacaggtgcctgccaccacgcccggctaatttttgtatttttagtaaagacggggttacaccatgttggccaggctggtctcaagctcctggcattgtgatccgcctgccttggcctccaaaagcactgggattacaggtttgagccactgtgcctggcctaagttttgcatttttagtagagatggggtttcatcatgttggccaggctggtcttgaactcctgacctcaagtgatctgcctgcctcagcctctcaaagtgttgggattacaggcctgagccaccacgccggcctatgtatttcttaaaattggttttatagagtatatttaacctattattgaaagttatttctgattaaactcattaatccatgtctgattaattttggcatataatgtataagatataataatctaacttggctttttgaagtagaaaacctggaagtgggaaataaattttgcattctatttcaattctgataaagtgaaggagtacttatgccttttgaactgcctttatattcttctttttttttttttttttgagatggagtctcactctgtcacccgggctgtagtgcagtggtatgatctcggctcactgcaacctctgcctcccaggttcaacgattctcttgcctcagcctcccgagtagctgggattacaggtgcccaccactatgcccagctaattttttgtatttttattagacatggagtttcatcatgttggccaggctggtctcggcctcctgaccttgtgattcgcccgccttagcctcccaaagtgctgggattacaggcgtgagccagcgtgcccggccgtaactgcctttatattctatggggaaaatgatatggtggatcagcaatgtctttcttccataggtataaggggatggtattgagaagactgttacaaaacattcatatgtataagcccaaatttaaacattgttccaatattgtattttttaaatttatttttattatttttatttttcgaatgttccaatattactatttgaatattctattgaaaatatcatttttatatgaattcagagtaaaattagtttgtggatttttctttttctgttgtttactattagaattatgtgagcatcaaaacaaatttaagtttcctacttttctctgttgaagtttgcaaatacctataaagctatctggttctggctggatgcagtggctcatgcctgtaatcccagcactttgggaggctgaggcgggcggaccacgtgagctcagaagttcgagaatagcgtgggtaacatggcaaaacctgttgtcaaaaaatacaaaaatcagttgggcgtggtgacacatgcctgtagtcccagctacttgggagggtgaggtgggaagatcccttgggcccagagctcaggaggtcgaggctgcagtgagatcgtggcactgcatttcagcctgcataacagagtgaggagaccttgtctcaaaacagacaaacaaataaagctatcagattctaaaacatgattagaagtaacagtttgttactctttctaattactgtctaacaagagacaacagtcccacctcttgagcgagttttagtaattaattatttagtctactgttgttggactttagtaattatttagtctactgtttaggactttccaactttttattttgaaaaatgtaaaacttactgaaaagttgcaagtctagtaaaatgaatagccattataccttcatgaaagcttaccaattcattaacttattgccctataacatatattgctatgttacgtagacacttttttttccctgaaccgtttgaattagttgcagaatcatgaccctaaatacttcagtatgtattgctcaagcacattttcctgctaagcacaatataattgtgataggaaatttagcagcgatatagtattcttatcaaatatacagtctgttagatttcctcaatttgtcatgataatttctttcttttttttttttttttttaagactgattctcactcctctcttgcccaggctggagtgcagtggggtgatctgggctcactgcaacctccgtctcccggcttcaagcaattctcctgcctcagcctcctgagtagctgggattacaggtgcgcgccaccatgcctggctaatttttttgtatttttagtagagataggatttcaccatgttgatcaggctggtcttgaactcctgaccttgtgatctgccggcttcggcctcccaaagtgctgggattacaggcatgagccaccgtgcccagccgataatgccttttaaagctggaatttttttacccaatctgggattcagtcaaaggccatacattgcatattgttgtcttgtctctagtctcctccagaacagttacctgtgtatttttttgtctttaatgatgttttgaagagtccaggctagttgttttacagaatttctgttttgacagaaaatcattcttgttagattttttagtgtggagttatagatatctaaatagtccataattacagggcaaggactaccaatctgtagtcccagctacttaggaggctgaggcaggagaatctcttgagccccaagagtttgaatccagccagggcaacgtagtgaaaaagactctgtctcctaaaaaaaaaaaaaaaaaaaaaaaatttttttttaagatagtctgtaatataatagtggggagttataggtatctaatttgacagtcctacttccgaaactcctcatcctcaacctaaaagtaatcttttaggagaatgtcttccagtgtatgcgtggaatttttaaaaatgaacaaaaatctttctactttgcaaagttgtaacacagattttgagctatgatattaaacttaaaaaattcctgcttcaccctgtcttgcatttacctttctgacacttgagaatagtcacaactctgtttttttaacttgcatttttaaaaatcacacgagcaatgttaattttaagcaaaataaactagaaaattctggtaaggaaaatgacaaaaataagtcttatataagtcctagcactcacatagaaaaactgttaacattttgggtcaatactctttcaaacttgaaggaatgtaagtgcttgtgagagagacattacaagaattttgtgtcatattgtaactctgtgttgtagtctgctccacaaccccccaaaagtggctacagtattaaataatgaaagcatggaaaagtagaggtaccatatgagcttattaaaaggaaacagctggaaggagaggctcttgtcttatcagtcagtatttagatacttatcatatactgtaaataattcttaatggttatatcaattacttttttttttttttctttttgagacagagtctgctcttttgcccaggctggagtgcagtcacgcgatctcagcttactgcagcctctgcctcctgggttcaagcaattctcctgcctcagcctcctgagtagctgggattacaggcatgtgccacctcaccctgctaatttttgaatttttagtagagatgaggtttcaccatgttggtcaggctggtcttgaactcctgacctcaggtgatctggccaccttggcctcctacagtgctgggattacaggcatgagccaccggcccagcctgttgagtgtttttattatgaaagtgtgttgcattttatcaaatgcgttttccatatttattgagatgattgtgggttttttcccttcattttgataaagtgatatattacattgatttcttttcatatgttgaatcacccttgcattcctagaataagtgccacttaatcataatgtataatccttttaacatgctgctggattcaggtattttcgttgaggatttttgagtctatattcataaggggtattggtctgtaattttttcttcttgtgatatctttgtctggctttggtatcaaggcactactggcccataaaatgagttaattcttatttaaatatttggtagaagtctggcttggtggtgcatgcctgtagtcccagactttggagaccgagactacaggatcacttgagcccatgagttcgagtccactctgggcaatatagcgagaccctgctctttaaaaaaattgtagaagtcatgagtgaagccatctagttccaggttgtttcctctgacagttttctgattactgttttatcaatgtctttacttgttgaaattagatctaggtcaatttagtctgttgaaatgttctgttttcttgagttagttttggtagtttgtgtgattttaggaatttgaccatttcatctagattacctaatttattggttgttcatattattctcatatcctttttatttctgtaagtttagtagtaacatctttgctttggccagacacggtggctcacacctgtaatcccagcactttgggaggctaaggcaggtggatcacgaggtgaagaatcgagaccatcctggccaacatggtgaaacgccgtctctactaaaaatacaaatactagctgggcgtggtgtgcgcgcctgtagtcccagctactcaggaggctgaggcaggagaatcgcttgaacccaggaggcggaggttgcagtgtgccaaggtcgccgcctctgcactccagcctggtgacagagcaagactccgtctcaaaaaaaaaaaaatctctgctttcattactgattttagtaatttgagtcttctatctttttgttcttttctgtctggttaataggtttgtctgttttgtttcttttcaagaaccaacttcttgaaagttggctttgttgatttttctgtctttttttttgtttgtttttttttgagacagggtcatccaggttggaatgcagtggtacaatcatggttcactacagcctcaacctccctggctcaagcaatcctcccacctcaacctcctcccaagtagctgggacaacaggcatatgacaccacacgcagctaattttcacattttttgtagagatggggtctccctagtttgcttaggctggtcttgaactcctaggctcaagttgttttcccacctaggcctcccaaagtgctgggattacagacctcaccacttactgagccactgcacccagccactttttctctttttatggtttatttttttctgttttttttttttttaacattttctatttcacttatcacagttctgctagcatatttttgtaagtttagtggccatttgtaaccttattctttgaattgcctatttatggaacctattttttgttattgttttttgtagaatgctttatgtattgtggcatatgttaacagcaccaggacctctgaacagtgttgaataataaaggtttcttcttgactgtaatgtaaatgtatttcaccattaaataggatagtatggttaagaaagtttcttcatctttctagtttactaggagtaggtaattgtgatgtataagtttcctacaaaaatctagtggtatatccatacaataggatactgcttagcaataaaaatgctcacaacaggcctggcatggtggctcatgcctgtaatcacagcacttagggaggctgaggcgggcagatcacttgagcccaggagtttgagaccagcctggccaacatggtgaaaccccatctctactaaaaatacaaatgtgtaggtaagcctgattcgtcctataatgtcaaatttcttgctggtatttctcagttgtattatcatttcatttattgttataattacatatgtgtgtgtgtttgtgtgtgtctatcgagggaggatatagtagatagtataatctctaccagttcagtgtaaagaagcaattttctttctctaaagggactgcacattttactaaattggctgttttctaagcctgaacactttgactaacagatgtagagaaaagggctttataatattaaatcaactgcttaggaccaacaatgtccttcttgtgaaaatctgaaggttcttaaaagatggaatactatgacattatcattgttgattcaaggagcattcctcaagtaatactgaatgtgctgtaattatcagtaccttcccccatcttctttttgttgctcttgaatgatgttattgtctattatttgactatgttttgcaaatttggaacagttacttaattctgaaaatcctactttggtctgagattttaaaataaattatattggattttattcttgttttatcagctttcttggagatgtatgggtttatgattggataaagtgacaccacccacaaaaattatgtatgcctttcacatttgcaagtgtaaatagcctaaaaagtgctaggcttctctggtctacttttgtggaaccaggaataaattagatctcattggctgttgatgtgattgttagtttctttttattgttcactttattaggaaggatatggtaaattgctttaatgatactttcctctaagaacagattagataatttaaaaaatgtaatctaatagactttttaaatgaaaatcgtatatgctgtttcatagtacctttaaaaaacttgttacaaatatttatatttttaaacctgatctaggctgggcatggtggctcacaccgtgagcccagcactttgggaggccgaagcgggcagattacctgaggtcaggagttcgagaccagcctgcctaacatggtgaaaccccgtgtctactaaaaatacaaaaattagctgggcatggtggcacacacctgtaatcccagctacatgggaggctgaggcaggagaattgcttgagctcgggagacagaggttgcaatgagccgagatggcgcccctgcactccagcctggctgacagagtgagactgtctcagaaaaaaaaaaaggcctgatctatagtttatacacttatattagtcctacattttgtttaggtatttctgtatgtgtatttagcagactagaagaattatggagtctaggattgctgtgaaagctccttgctgctgtttctttcctgtagttttttcatgacagctattaaaaatgaacaagacctttctatgttagtttacattgacagctctgttgtaacaatattctgaataggtgcagggtaaccaggatggtgctaatttttaataataaagtgctttcaggaactttagtatgtatagaaaaagaagcagttatgcactggatgctgttaactctagtctaacagtgtaatgatgtatttcagggttgtcttttgggagttctcgtgtatttatatattttatttttgactttttcctgtcttctaacaatccaaacaatatacataggtgttattggatcttcaggtaatatgagtgcttcacctttattctttttaaaaagttattttggctactttggagcttttgccttttcatatacaggctagaatcagtttgttgatatctacagaaaatcctcttggacttttgagattgtgttgaatctatgaatcattgaatttttggatcagttagaagagaattacctcataacaatattgagtcattcactccatgaatacagtacatgtctccatttaattaggttgactttgatttctttcaccagatttgtattgtttttactgtataaattctacccatatattgttagacttatgtttactcagtttttttcccattgctattttgtacatttttgggattttctctgtacacaataatattgtcaataagtagagacagttttctttctttctgttacatatgccttttagttctttttcttgccatgtaacactgactagaacttctagtacagcgttgattaggagtgattagagtggatatcattgccttctttataaatttattttttacttttaatttttgtgggtacatagtaggtttatatatttatggggtacatgagatgttttgaaacaagcatgcaatgcgcaataagcacatatgaagaatggggtatccatccccccaagtgcttatcctttgagttgcaaacaatccaattatactcttcaagttattttaaaatgtgcaaatatggaacactttacaaatttgcgtgtcatccttgtgcaggggccatgctgatcttcttattccaattttagcatatgtgctgcccaagcaagcaccctttgtgttatttctaatctttagaggaaagctttcagtcttcaagcattaagtatgatgttagcagcaggttttttgtagatacctttaataggttaaagatgttcctttctattcctagtttgagtgttttatcatgaatggatgttatcaatttgattttctgcctctgtttatatttcttctttagtatgtctagaatggagtatgacaatgattttctaatgctgaaccagccttgcatttctagataaatcctgcttgattgtgctgtggtgtcatttttatatattgctgaatttaatttgctaattttgttgatgatatttttgcttttatgttgatgacttttgcttttatattggtcagaaatcttcagtttttgtcagtgttctgaagccatcaatgtcatgatggcttcataaaatgaattgggaaatgttctctcttctaagcttgaagaatttatgtagaattggtatttttttttctttaatgtttaatgaaatttgataatgaaactgtctagacctggagttttctttcatatacatatgactaatcaggttactttcttgagtgactttttggtagtttatatctgtcaaaataatttgtccatttcatctgtgttgtcagatttatgagcttacagctgttcattgtatttcctcatctttttaatgtgtgtagggtctgtagtgatatactctcttttgtttgcattattggtaatttatgtctgcttgttttcctttgttagtttggctacaggcctttctgtcttactgacttcctctgcttcctcccaaataaccaatttttgacttgatttttttctctattggccttttgttttctatttcactaatttctattctatttagtatttccttccttatatttacttttggcttaacttgcttttttctttctttcacgccattctcctccctcagcctaccgagtacctgggactacaggtgtgcactaccacgcccagctagttttttgtgtttttagtagagacagggtttcaccgtgttagccaggatggtctcgatctcctgacctcgtgatccgcctgccttggcctcccaaagtgctgagattacaggcctgagccaccgcacccaggctgtattttagtttttattcagttcatagtctttttctaattttcctcaaaactccattattgactcatgagttacttagaagtatgtcattcactttccaaatgcagtcatgcaccatgtaacgatgttttcagtcaacagtggaccacgtacaaccatgctcccataagattatagtaattgtatttttactgtacttttttttttttttttttgagatggagttgtgcccttgtttcccaggctggagtacaatggcacaatctcagctcactgcagcctccgcctcccaggttcaagcgattctcctgcttcagcctcctgagtagctgggattacaggcgtgcaccactatgtccatctaatttttagtatttttagtagaggtaaagtttcaccatgttggccaggctagtctcaaactcctgactagggatgatccacctgccttagcctcccaaagtgctggtattacaggagtcagccactgtggctggcttttttttttttttttaagggaagaggtctcactttgtttcccaggctggagtgcagtgactattcgcaggcatgatcagagtgcactacaacctcacactcctgggcacaaagtgattctcctgcctgagcctcctgggtagctgggactataggcacccaccaccatgtctggcttcccccgtttttagtaactatattaggggtattgggatgttgtccatttcttctctgtttttcaaaactccacattgttaaggatattaactcttatgtaagtttcaaactttttaaaagtttatcttattatttgagacagggtctcgctgtgtcacccagactggagggcaatggcacagtctgctcactgcagccttcacctcccggattcaagcaattctcccacctcagcctcccgagtagctgggactacaggcatgcactactatacctggctaatttttgtatttttagcagagacagggtttcgccatgttggtcaggctggcaggctggtctcaagctcctgacctcaagtgatctgccaaccgtggcctccgaaagtgttgggattacaggtgcaagctacctcacccggcctttttattttattttattttatttttttttttttttgagacagagtgtcgctatgttgcccaggctgcagtgcaatgacacgatcttggctcagggcatcctctgcctcctgggttcaagcgattctcctgcctcagcttcccgagtagctgggattacaggtgcttaccaccacgcctggctaatttttgtatttttagtagagacagggtttcccatgttggccaggctggttttgaacttctgacctcaggtgacccacccgcctcagcctcccaaagtgctgggattacaggcgtgagccactgcacctggtctttttttttttttttttttttttaattcttacagatgtacttcctgctttcataccgagtttatctttttttttattatttttggtatcttttactgtgttcctctcaagctttcttttttatattgtcaaatatgtttttttcttactgctttgcatgtagatcatagataagtttcttcacactggttacaaagaaatttactcatatttcctcccagtactcgtatagtttcttttttttatatttgtgtatctgatccctatgtaattctgatgttcggtttgaggaaaaggtataatttttctctcacatggctattaggcgctctcaaaaacacatttttatcaaatcaatctttttcccattgatttgagatgccttttttagccatttagcagtaatgtttatggtaagatatgtgataggcatataactttttttccaaatggattgtcaagttttctcaacctttatttcttctcctttaactgtgtgtgttaaattccaagatagacatacatgggtttgtttctgggtcttttaggttattaatttccttgtctttttgttttagtattttactcttgtgatggtgatagtattgtgttgtcctttggtctttggtagaacaagtatttcaattccctaattatctcttgtctctctgaatttctggaagttgctattctgcattttctctgttcttaacaactttaaagtttttgtatatcatagtcttatgcatactgtttgttctgtaagtatttgtggaagtgaaatcatttttaggagttacatagaagataattaagtatattgttttattcagcaatatttatataataactgtagatggtaaggggtagaagctggagagatgatacaaaaatgaatgagacacattgtgcctgcttgtttaggaaagagagagttaaataattgcaatataatacggtaaatgcggcaggatgctttgggggcataaagggagagtaactgacttttctaatagagttaaggttttgcaaacattatgacatttaatctaaatcttgaaagactttgagtgggaatttgttaggtagataagaaagaagatgccgatcatggacccagctagaaaattttaatgtaaaataattcttgtaataagggcactaaaacttaatcattcaaaattcttaactacggtcttaagtaacactgaagtttgtttttttaatagtttgattaattgaaaattaatactttatatggaatttagttcagcctactcagtttagggatgagaagttaagtgactttgctatggtcacatattcttggaagaactgtgattaagactgctccagggaacttctagaacagggaaattggtaaaagtatatggggcagccttggatatatattagaaattgaatacaaattaagaatttatatatttttattgcagtgtggtgttaatttaggggggtacaaaagacatataaatgtattttatatagttacaaagaagttttctagcaagaattaaaattgcttgttacttgacaagaattggatggagctgtttttttctcttaaaagtctgatgaaatcaggccaggtgtggtggcttatgcctgtaatcccagcactttgggaggctgaggcaggcagatcacttgaggtcaggagttcgagaccagcctggccaacatggtgaatccccatctctactaaaaatacaaaaattagccgggggcggtggtgcgtgcctgtagtcccagctacttgggaggctgaggcaggagaattgcttgaacctgggagatgggtgttgcagtgagctgagattgtgccattgcactccagcctgggtgacagagtgagactctgtctcaaaaaaggaaaaaataaagcctgatgaaatcaattttggagtttttaaaaattgttgaatttgaacaagttaaaagaaaatagctaacacttactgtagtgcttattactccagagtattactctatgctttcatttattaactcatttaaccctcctgattacactgtgaagtagattttttcctccttccttcctttcccttttcttttctttcctttcctttttatttcctttttcctttcctttcctttctttcatctaacaaacagggtctctctctcttgcccaggctggaatgccatggggtgatcatcactcactgtaacctcgaacctctgggcacaagtgatcctcccacctcagtctcccaagtagctaggactataggagcacaccacaccacccagctaattttgtaatttttttgtattggaagatcttgctgtgttgtctgagctggtctcaagctcctggccgcaagtgatccttgcactttgacctctcaaaatgcttggattacagatgtgaactttcacacctggcctatagtcattttacagattaggaaaatgatactacctaatttcagaactagtgttgctgggattcctatccagcagtgtcattccagagtccaggttccaaagcctcttaattatgacatccagttttgttttgttttgttttgagacaggatctcaccctgttgcccaggctggagtgcggtggtgtgatcatagctcactgcaaccttgacctcctgaactccagtgatccttccgccttagccgccaaagtagccaggactataagtgcatgacaccactcttggctaattttttaaatttatttttgtagaggcagggtcttaccatattacccaggctggtcatgaactcctggtctcaagcgatcctcctgccttgacctcccaaagagctgggattacaggcatgagccactgagtctggctatgacagccagtattaaaactgggtaatctgatataaaggaattgataggacaactgccaggaagttttctggttatctgtatttctacttatttaatgaaacagttgataaagggcatattttaatgtgaatcaggtgaatcaagtttatggagaaacagttgtctgtgaaatacattactttctcccactatatttttctttgaatgtctgttagagttgattagtacactagcatacggtatctgaaaagaaaagaagtttcctgttgtcagaaatactgtgggcacatcttgcgttattgtgtatttttaaaatagtctcttttatattatcttctctattgatgagatgactgcatcagaagtggatacatttttaagtattgacttagaaaacctcccaagatacaaagattatctcatttttttaaagtgctgtatagtaggaatctgtttttgaagtaccatggtgttcatgatgatgaaacaggtttaggagctactgcagtagtacccacactgccttttcagtgaaattctagacatgagataaatttgtagatcagtatatgaccttatactaattattcttagcagtttttgccttttctgactttttttttctatttttctacagtagtttatgccaacgtgacttcattcatacagatgaaccaaggatcgggatagcagtataaaattagaatcaagacagctgactgctcagcaggatgccatcaactaacagagcaggcagcctgaaggaccctgaaattgcagagctcttcttcaaagaagatccagagaagctcttcacagatctcagagaaattggccatggaagctttggagcagtgtattttgtaagtgttagtggcttgatgtcagtgactaaaatttacttaatgtccactcctgacagagcaaaatatagtaatgaaaagagatataggccatagtcattttatagtcacttgcatagggggaagagagagagcgcgagagcgagagcgtgggtgagtgtgtgtgtctgtgtgtaaaattcaaatatgaaaatagttttatttattgaacttcttggattattgaaaaaatgagaaagaatattattttgtgggccaggcttggtggctcacgcctgtaatcctagcactttgggaggcaaggttgggtggattgcttgagtccagcagtttgagaccaccctgggcaacatggtgaaaccctgcctctacaaaaaatacaaaacttagcccggtgtggtggtgcacacctgtagttccaggtactcaggaggctgaggccagagaatcacctgagcccaagaggcagaggttgcagtgagccgagattgtaccactgcatttcagcctgggcaacagagcagatcctgtcacaaaaaataaataaataaataaataaataaataaacaaatgaaagaaagaaaaagaaaaaaatttgctttaacttatgtgttacttttttagaattcttagcacaccttttttataagtctcatggcttgcattgctatagagttaaatactgcagaacacagacttccactgatttctacttctgtaaagtcccattcagagtcaatcttagtcttgtggaggtctaggattattatttgacagatataccaaagtctgtttcttttatatgcatttgtgtgtgcgtgtgaattaaaaaaacttatcaaatttgctgttttaattattttttaacatttgcacaaacattaccaccatctacttctaaaacattttcatcacctgaaatagaaactctatatccactgacagtaactcccatttcaccctccacccagcccctggtacctgtaatctcccttggtctcgatgaatttgcttagatatttctagatattcatagaaatggagtcaaacaatatttattcttttgtttctagcttatattatttaactgattgtttttgagcttcatccatattgcagtatctgtgagaacttcattcttctttatagctgaataatattccattgtatattaaaccataatttgtttatctatacatctgttgatgaacacatgggttgtttccacttttgactattgtgaatgatgctgccatgaacattgatgtgtatctggttgagtccctgttttcaattttgagtatgtacctaggagtggatttgcaggttcctatagtattctgtgtttgtttgtgggactgcctaactgcaccacagcagctgcaccagtctttgttctatgtctatggatttgcctattctggatacttcataaaaaagaaatcgtacaatatttgacctttagtttctggcttactttttttttttttttttttgagatggagtctcgctctattgcccaggctggagtgcaatggcacgatctcggctcactgcaagctccgcctcccgggttcatgccattctcctgcctcagcctcccgagtagctgggactacaggcgcccaccaccacgcccggctaattttttgtatttttagtagagacagcgtttcaccgtgttagccaagatggtctcgatctcctataggcacgtgctactaacccctggctaatttttgtcttttaagtagagacggggttttgccatgttggccaggctggtctcaaactcctgacctcaagtgatcctcttgccttagcctcctgaagtgttgggattacaggtgtgagccaccacacctggcctattttgagttagattttttgttttgttttgtttttgttgttttgagacagagcgtcgctctgttgcccaggctggagtgcagtggtgcgttctcagctcactgcaacctccgcctcccgggttcaagcaattctcctgcctcaacctctcgagtagctgggattacaggtgcatgccaccatgtctagctatattttgagttagtttttatatatggtgtgaggtagaggtctaacttcattcacttaggtttttttgttttttttttttttgagacagggtctctcactctgttgcccaggctggagtgcagcagagtcatcatggctcactacgtcctcagcctccgtgggctcaggtgttcctcccacctcagcctccagaatagctgggaccacaagcgtgcaccaccaggcccagctaatttttttgcttttttttttttttggaaatggggttttgctatgttgcccaggctggtgttgaactcctgggcacaagcagtccacccaccttggcctcacaaaagtgctgagattataggtgtgagccaccacacctggccccaacttcattcttttgtgtgggtaaatctagttttcccagtacatctgttaaagagactgttatttcccccattgaattgtcttggcatccttgtcaaatcagttgatcatatttcatagattaatttctgatctcttaattctattccatttatctgtatgtctatctttatgtcagtaccacaccgttttgatgactgtagctttgtggtaagtttgagatcaagaggttttattcctccaactttgttattcttcttaaggtttgtttcagagctccttgaaatttcatatgaatttgaggattggcttttttttttcttattaccactttccagttgacgtggcttttttatttctgcaaaaaaagacttagaattttgatagggattgtgttgactctatagatcacttttggtagatctatagatcactgtcttaataatattaagtcttctgatccatgaacacagaatgtctttctaaacatttatttatagctttaatttccttgagcattattttgcatttagttgcaaatgtttcacctccatgcaacatattcttaggtttttttgtttttttgttttttttttgtttttgagacggagtctcaccctgtcacccaggttagagtgcagtggtgcgatctcggctcactgcagcctcggcctcctgggttcaaatgattctcctgcctcagcctctcaagtagctgggactacaggagcatgccaccatgcccagctaattttttgtatttttagtagagacggggtttcactgtgttagccaggatggtattttttgttttttgttgagacagtcttgctttgtcacccaggctggagtacagtggcacgatctttgctcactgcaacctttgcctcccaggtgattctcctgcctcagtctcctaagttgctgggattacaggtacacaccaccacacttggctaatttttgtatttttagtagagacagggtttcaccatgttggccaggctggtcttgaactcctgacctcaagtgatctgcctgcctcagcctcccaaagtgctgggattacaggtgtgagccactgcatctggtcattcctacgtattttattcttttagatgctagtgtaagtggaattactttcttaattccgtgtgaaattgttcattgctgatgtatagaaacatagctgttttttgtatcttcatcttgtaccctacaactctgctgagtttgtatgttctagtatctttctgttggattctttgaaatttctacgtacagtattatatcatttgcaaatggagatggttttacttctttcttttcaacttgaatggctttcgtttttcctgtcttgataccctgggctagaacttccagtacagtgttgaacagccgtggtgaaagtgagcatgttgtcttgttcctgatagtagtgagaaagccttttcagccttttactattgagtatggtgttagcactgggtttttaataaataccctttatcatgttgaagaagttccctttattcctgtttttttgagtgtttttatcatgaaagtattggattctgtcaaatgccttttctgcatcaagctggatcatgtgttttttttttccttcattttattaatgtggtatatcaaattgattgattttgttagtttaaatcacccttacatgtctgtgataaatcaaacttcatcacggtttgtaattcttttaatatgctctaggtttctgtttgctagtatggtgttgggaatttttcattccacatttgtaagagatgctggtctgtagttttcttgtgatgtctttatctagtgttggcatcagggtaatactggcttcatagggtgagttaggaagtgttcccttcttttctattttttgatagagtttgtgaaggattggtattagtcttctttaaatgtttggtagggccgggcgcggtggctcatgcctgtaatcccagcactttgggaggccaaggcaggcagatcacctgaggtcaggggttcgagaccagcctggacaacatgtcaaaaccccgtctctactaaaaatacaaaaataagttgagtgtggtggtgcatgcctgtagtcccagctactcggggaactgaggcatgagaatcgcttgaacccgtccatgaggtggaggttgcagtgagccaagatcatgccactgcactccagcctgggggatagagcgagactctgtctccgggaaaaaaaaaatgtttggtagaatttcctagggaagccatttggttctgaagttttctttcttgggaggtttttgattacagattcaatctctttacttatgataggtctgttgagattttcgattttcttgagttagtttagtttgtaagtttctaggaatttgtctattacaggttgagcatcccaaatctgaaaatccaatgcttgttggagcatttcagattttggattttcagactggggatacccagccagtaagtgtaatgcaaatattccaaaatgtgaaaaaatttgaaatctgaaacacttctggtcccaagcattttgcacaaggtatactcaacctataatgttctcatatagttctatttctttttttgttttgttttgtttttaaaacggagtctcgctctgtcgcctaggctggagtgcagtggtgtgatctcagctcactgcaagttctgcctcccgggttcactccattctcctgcgtcagccccccaagtagctgggactacaggcgcctgtcaccacgcctggctaattttctgtatttttaatagagacggggttccactgtgttagccaggatggtctcgatctcctggtcttgtgatccgccttcctcggcctcccaaagtgctgggattacaggcgtgagccacagcatctggccatatagttctatttctgtaacgttctcccattcttttcttctctttttttctttttcttttttttttttttttttttttgagacagagtctcactctgtctctgtctcccaggctgcagtgcggtggcatgatcctggctcactgcaacctctgcctcctgggttcaagcacccctcccacctcagccttccaagtagatgggaatatacaggtgcatgccaccatacctggctaatttttgtattttttggttgagatggggtttcaccatgttggccaggctggtcttgaactcctgacctcaggtgatccgcccgcctcggcctcccacagtgctgggattacaggcgtgagccaccaccccaggcctttttttttttttttttttttgagatggagtgtggctctgtaacctaggctggagtgcaatggcgtgatctcggctcactgcaacctccacatcctggattcaagtgattctcccacctcagcctcctgagtagctaagattacaggtgcgcaccaccatgcccggctaatttttgtatttttagtagagacggggtttcaccatgttggccaggctggtcttgaactcctaacctcaagcgatccacccatctcggcctcccaaagtgctgggattacaggcgtgagccactgcaccttgcctgagtttactgatttaagtgccatccaaacaatgccttcgcagaaacatataaatagtgtttgactaaagatctgggtaccatggcctagcccagttgacagataaaattaaccataacaaaaggccaggcacggtggctcacgcgtgtaatctcagcactttgggaggccgaggcaggcagatcaggaggtcaggagatcgagaccatcctggctaacacggtgaaactccatctctactaaaaatacaaaaaattagccgggtgtggtggcggacgcctgtagtcccagctacttgggaggctaaggcaggagaacggcgtgaacccgggaggtggagcttgcagtgagccgagattgcgccactgggctccagcctgggcgacagagtgagactccatcttgaaaaaaaaaaaattaaccataacactgttatatgattactccacagtttgtttctccattcttttgttggcagaaagctttactgtttacggtttctggctattatgaataaagttgctgtgaacaattcatgcacagttattttttatggatgttttgatttcagtaaatatcaaggatggggttattgagtcatcaggcaagcttatgttagttttataatcaattcccagatgtttttatcaagagggagaaattttacagtcccatcagcagtgtatgagaatttggtttgctctttatcgtctccaacatttggtattgacagtcattttaatttgcattctggtgggtgtgtagtagtatttcaatatggttttttttgttttgttttgtttttgttttgagacgaagtctcgctctcttacccaggctggagtgcaatggcacaatcttgtcacactgcaacctctgcctctgggttcaagtgatactcgtgtctcagcctccccagtagctggaattacagacatgcgccaccacacctgattagttttttgtatttctattttttgtttatttattttatttgttttttttgtgagacagagtctcactcttttgcccaggctggaatgcagtattgcaatctcgccccactgcaacctctgcctcctgggttcaagcaattctcctgcctcagcctgccgagtagctgggattataggcgtgcgccaccacgcccaggtaattttattttatttttattttttatttttttgtatttttagtagagacaggattttaccatgttggccaggctggtcttgaattcctgacctcaagagatccacccgccttggcctcccaacgtgctgagattataggcatgagccactttgcccagcctaatttttgtatttttactagagatggggtttcaccatgttggccggttacttaaggagaatttgtagatttttgagcttctgcttttcagcttccttttctgagattgtgcttttgttagcttctgactctggcttctgtctcctcagcctggctttcttcttggactctgttttcctttcacaagttcagagatgaagctggggtaaatttggagttcattttgcatactgttgtttttttcaaggattgtagtctctaaagttatgcctgcatttgttgctctctggtaattttatataattgttttacatatattgcctgctttgtcagctcactgcaaacaccgcctgctgggttcaagtgattctcctatctcagcctcccgagtagctgagattacaggcgcccgcccccacgcccggctgtttgtttttttttatttttagtagaaacgggatttcaccatgttggccaggctggtctcgaactcctgacctcaagtgatccacctgcctcagcctcccagttacaggcatgagtcaccacacccggcctcattctttttttatggccgaatagtacttcattgtataaatgtaccacattttctttatctatttgtctgttggtggacacttacattgtttccagctcttggctgttgtgaatagtgctgcaataaacatgagagtgcagatatctctttgataatactaatttcctttatgttgggcatatacctaatagttggattgctggatgatatggtagctctatttctagtgttttggagaacctccatccaaactcttcttcatagtggttgtgctaatttacattcccaacagtgtacaggggttcccttttctccacatcctcactagtcatattatttgtacttacctgggcttttcatatatccttctgtaaagatgtggtgttttggagcagtgggtctttcattgttatattggaaagttttgaatttcagcaggttttcctcagacctctttaggcctgcctatatgatctacaaagtggtgaaagtaatgtttcttgcccttttccttttattaaagagacaaagacccatcttggcaaaatatcaatgatttaactttttcaaaataaaactataaaattgcattatcccaattctagaactttgtcagtagtcttttttttctgagacggagtctcgctctgtcacccagactagagtgcagtggcacgatctcagttcactgtaaccttcacctcccgggttcatgcaattcttctggctcaggctcctgagtagctaggattacaggcatttgccagcacacctggctaatttttgtatttttagtagagaccgggtttcaccatgttggccaggctggtctcgaactcctgacctcatgatccacccgcctcggcctcccaaagttctgggattacaggcatgagccaccacacccggcctgtcagtagtcttttttgacaagtatgactgaagttggtatgcctaggatcaagggtatagtgggaactaaagatgtaatgggagaaaagaaagataatcaagggctcttgaaatacctgctacattaccctaagaaatatgggctttattctgaagtcttcagggaaccactgaagtacaacagaaatattttatttccatttgtgaagtaaagtttactcttgtattaatgtagaggaaaggttggcatgtatcagagatcgaagcagagagactgattaggatgcttttataataatttaggaaagaaatgcagagagcttagttagtagcagtgagagtggagaggtaagtaaacagttgagaatgaaagttttaatcagtagaataaagagcatttatattctgataagataaagggcgcatgtggtagtgtctcactcctagagtagaattattaaagagagtgagaggaagtgattctctgttgtttgcacctccttatgtaataattgctaagattcttctacccaaactggattatttcagagagctgtagttgaaggtctcatagtctcagaaataagattctaacgagaaaacaaaaacaaattgttctaagtcagatatctggagctggtttaggagagactcggaaattaggcataatgtgtgatcctggattagaaaaaaaaagcctgtaaagagcattactcaaacgttggtgaaatttgagtgcgtactatgtatgcatctggataatgatattatatcagtgctgaattttctacatacggtaattgtactttggttattcatgagaatgttcttgttcttaggagatacatgaagaagtgttttaggactaaggatcagaatattctctaatggctctttaattataaaataatgataacaaaaggtatatttagatagaaaatctcaaaggaaatgtggcaaaatgttaaccaagaatttttctatagacagggccaacaaacctcagccctgacaccaaatccaacctgtgatgtgtttttgttcagctcctaaactaaggacagttttaacattaaataaagaagaatatgcaacatagattgtatgcggcccacagagcctgaaatttctactacttgccttttggagaaaaactttgctcacttctgatctaaaggaaggcataagaagggttcactgtgctgtgccaactttgtcatatgtttgacagatttgtgtaatgaaatgtagagagcgaaattttttttttttttaatgctgatttagggggccaggaaactctccaattcaggttaggaccatcccagaaacaattgaatgaaagcacagaggagtcaaggttaattaactcaaagcaggttttttctgttatgtttattgatgtgtgggaaacatgaacatgtagatgaggaaagtttgaatgtagtccagaattgaatctttttgctgcaattctatttctgggtcactaatcttcatattttgtggtatcagagaaacccatgcacacactgttctgttgttacatttcctctcatccccactccatgacaggatgaaatgtgcagtgtttgtttatagactatctaaaggaaggaccctctggtcaaatttttttaggtggctaaaaatagctctttaacacacttctgaattttaattaattggcagggatcaccttaaattaaaaaatactcaaattgagtcagccagcatggctgtttcatcaggcaagctaatcaaggactggtaccgtagtgagtatttgaaactaaaccagagtcagatgtccaaaaggatcactgtctctagattaccaggaagataaacataatcttttagtttccaacaccttaaatagaaccaatgtgatgtcagtagatgggtcacacaataagaaatataatataaaagccaaagagaacactggcttgggaaccaggcagcttgctaacaaatatggtagaccatgtatggtcccagcaaaatcatttatttactttctaacaaagtggggttttgttcatttcttgaaacgggatgtaatatttacctcttgtttcctagtataagattttactaatctgtgctcccttagcaggtttgcaagttttatattttcagtgattacagtaaattgtttggtgttgttcacattagtctcataagaccatttatatataattaattgatgtagtgatttcagatcattcttatgaatttattaaaatagatcccaaatgtatcttcacagacaatttcctagtttgaaacaaaattatttattgtgtgtattttctttttcctactctctctgactatttctgttcccgtttttctctcaacagcatctagtttgtctttaggactacaacttattttgtttttgctctttttctctctggaggtgagaatagatgatgtgtagtattgtgttctttgttagttacttatagttcatttggttctgttctacacagtgttttattatgtaaacaaacacttttgcaagcttttcttactgttactttctactagaacattccatctttttttcaagttcatttgttaatattctatcatgtcaagtaaaatgtagaaattatttatccctttccatattctttatgctattcttgtcatatgtattgtatctacatatattataaacatataatacaatgccataatttttgttttaggtaattttttgctttgtaaatgcaaaataatgaaattggactgctgcctcatactatatacaaaaattaacccaggccaggcacggtgggtcatgcctgtaatcccagcactttgggaggccaaggcgggcagatcacccaaggtcaggagtttgagaccagcctggccaacgtggcgaaaccccatctttactgaaaataaaaaaaattagccgggcatggtggcatgtgcttgtaatcccagctactccgggggctgaggcaagagaatcacttgaacccgggaggtggaggttgcagtgagccgagattgcgccaccgcactccagcctgggtgacagagcaagactccatctcaaaaaaaaaaaaaaattaactcaaaatagatgagagacgtaagtttaacagttaaaactataatactcttagaagaaaatgtagggataaatctgcataacatttgttttggcaaagccttcttagatgggacattaaaagtgtgaacaacaacaacaggataaattggacttcttcaagattaaaaactttcctgcttcaaagcagtgaaaagacaacaggagaaaatatttgcaaatgatatatctgacaagggacctgggtcttgaatatatgaagaactcttacaactcaataataaaaagacactcaattttaaaaataggcaaaggaccttgaatcaagatttcttcaaagaaaatatgcaaatggccaagaaacacatgaaaagatcctcaacctcattagtcatgaattttgacattatgctaaatgaaagaagtcaattacaaaagaccacatatatgattacatttgtatgaaatgtccagaatgggcaaatctctagggacagaaagtaaattactgcttaggtctgggaggtaggtaaggagacaggagactgatagctaaagagtttatgggccaggcgcggtggctcacgcctgtaatcccagcactatgggaggccaagacagatggatcatgaggtcaggagatcgagaccatcctggctaacacgatgaaaccccgtctctactaaaaaaaaaaaaatacaaaaaaattagctgggcgtggtggcgggcacctgtagtcccagctactcaggaggctgaggcaggagaatggcatgaacctgggaggcagagtttgcagtgagccaagatcgcagcgctgcactccagcctggactactaagcgagactccatctcaaaaaaaaaaaaaaagaaaaaaaaaatgttctgtaattgaccgttctaatggttgcacatatctgctaatgtactaaaggccattgaattgtgtacattaaaatgggtaaattatatggtatatgaattatttctcaataaagctgttatatgaccttttagtcctattaatcaaaatcagggggctcacaggtaggtgagtagagaacattttggaaaaagaaattcatatctaacaagacttatgtggctagatctacttcaccctttacagtgaatggtacaggtttccactaaccaatccactggcagttgaaattaaaatgtccttagttcttcactgtactcatgtagcagaacacagataataagctctgtcttttttttttttttttttttgatacagggtctctgttgctcaggctggagtgcagtagcgcaatctcaactcactgcaacctctgccttctgggttcaagcgattcttgtgcctcaacctcccgagtagctgggacgacagacatgtgccactatgcctggctaatttttatatttttggtagagacggggtttcaccaagttggccaggctggtcttgaactcctgacctcaagtgatccacccgcctcggcctcccaaagtgctgggattataggcataagccaccatgcctggtcttatttaatttttttttttttttttttttttttttttgagatggactctcactctgttgcccaggctggactgcaatggctcaagtgcaatggcatgatctcggctcactgcaacctctgcctgccatgttcaagcgattctcctgcctcagcctcctgagtagctgggattacagacgtgcgccaccacacctggctgttttgtatttttagtagagacggggtttcaccatgttggtcaggctggtctcggactcctgacctcgcaatccgcgcgtctctgcctcccagagtgctgggattacaggtgtgagtcaccgcgcctggcccttacttaattttttaaagcaacctttattgaggtataattttacaggtgctgtcctttttttaaaaaaaaagttttttgaggtataatttacataccagaggtctaccagttttaagtgtacagttcaattatttttagtagatacaagttttgtagccatcactacaatccagttttagaacattttgtctttgggaattcattagagcctgaattgaaaacgagttcttgcacagatggtttgagatggtttctaacccttttattaaactcattttaaatatttcacagctattgccttgtactttcttaatagttattttttttgtgtgtatagtgggagtttcgctcttgttttctaagagttaactgtcaagtttctgtgctttttttttttttttttttttttttttcagattttccacaacagtattaaataatcatcatgacagcattttaaggagtctggtcttgatcctgattagcagttgttttcaatagacagcatatgttgaggaattaccttgctaattttgtttttctaagagtttggccttctctacaattgaatacatttagcgttaggcctgtctcacattttcagcatttattgagagtttatatatatttttccccttgacttttaaaagatgtggtgaattatgaaatgtttttctagtttcaaaatcttttgcattcctgtgtgttttgttttttgagacagagttgctgtccaggctggagtgcagtggcacggtcatggctcactgcagtctccgactcccagtttcaagcgattctcctgtctcagcctcccaagtagctgggattacaggcgtgcaccactacacctggctgatttttatatttttagtagagatagattttcaccatgttggccaggctgatctcgaactgctgacctgaggtgatccacccgcttcaccctcccaaagtgctgcgattacaggtgtgagccaccacgcccagcctgtaatagtatattttatccaaaggaaaaatcttttaatgccctgtaaaatttggtttgctaattttagagttttcccatctatattcacaaatgcaattggtacctaactttcaattttgtactctttatgaggtttcagttatagggttaaactgcctttgtaaaattaatgggatagctcttctatttttctcttatatattctggaaagttcctttggtaaaactgtttttcactgaagactatgttaaagatcattcattggtattcttttcaatctgccatcattgttttactcatgttattgtctttaggtcagttttagtaatttattctttcttaaaaagttgtctgtttcattgagatttcaaactttattagcatagacttttatacacttgtattgcattgtctctttgtttatagtactactcaaatttctgtatttttcttctcagattactcaaaggtttattttcttatttttttactttgctttattttctttttaaagcactagctccaggataattttataagtattgctgtatagtgttatttttaaaattttctttaaaagtggttttgatgtcctttttgacatggtagtttacaaatgcttttatattcgcaaagaaatagttgcctagatttcacctgttaatttttacagtgcttctttctttctttcttctttaggcacgagatgtgcgtaccaatgaagtggtggccatcaagaaaatgtcttatagtggaaagcagtctactgaggtaggttaaatatgtacattcttgtttttttcttatatttatctcagaataaatatatacattctttttttttttgagactgagtctccctctgtagcccaggctggagtgtagtggtgcaatcttggctcactgcaagctccgcctcccaagttcacgccattctcctgcctcagcctcccgagtagctgggactacaggcacccgccaccacgcccagctaattttttgtatttttagtagagatgggtttcaccgtgttagccaggatggtcttgatctcctgacctcgtgatctgcccgccttggcctcccaaagtgctgggattacaggcgtgagccaccgcgcccggccaatatatacattcttattggtatgttagaggaagacataatttttaactggggaggaagggtgggaattttttaagtgttaacaggtgaagtatacacatcttaagtgtatatctcaatgaatttattttcacaaaccgatgtacccatttaactctaatagtactgagagccataaacagagcattattggtatctccaaatcccccctactcttgcttcctgcttttatttttatttatttatttatttatttatttttatttttttttagatagagtctcgctctgtcacctaagctggaatgcagtggcacaatcttggctcactgcaaccttcgccacctctcaggttcaagcagttcccctgcttcagcctccagagtatctgggattacagttgtgcgccaccacacctggctaatttttgtatttttagtagagacagggtgtctccatgttggccaggctggtctcaaactcctgacttcaggtgatccacctgccttggcctcccaaaatgctgggattacaggtgtgaaccactgtgcttggcctgctttcaatttttttttttttttttaggagctggagtctcactctgctgcccaggctggagtgcagtggtgcgatctcagctcactgcaacctctgcctcctgggttttagcaattctcctgcttcagcctcctgagtagctgggactacaggtgcatgccaccatgccaggctaattttttgtattttagtagagacagggtttcaccatgttggccagactgttctcgaactcctgacctcaggcaatctgcctgcctcggcctcccaaagtgcttggattgtaggcgtaagccaccgctcccagccttaattttttaaactgtcattttaaatattctctgtttatcttggaaagattatcagtttctaaaaaattaaagtaaaataagatgtacttgacagtaaattatactggatatgatcttttttttttttgagacagagcatctctctgtccaccaggctggagtgcagtggcgcgatcttggctcactgtaacctccacctcccaggttcaagtaattctcctgcctcagcctcccaagtagctgggattacaggcgcctgccaccacacctggcaaatattttgtatctttagtagaggtgggatttcaccacgttggccaggctggtcttgaacttctgacctcaagcaatccacctgccttggcctcccaaagtactgagattacaggcgtgagccaccgcacctagcctgtgatctttaaaatggtttaaacattgtttaatgcctgttttaaacaaactttaatcaacatgaatgtatatctagtctgagaaacgagcaatgtataacaatttgaaaaattagaaaatgaaattattaatgctacattgaatgtactttagttcactaatattctaattagttctcttcagattatattctacctaatttcataaatttatttatgaaatgtagtctgcttttaaaaatctgcaattctgcctggcactgtggttcacacctgtaatcccagcactttgggaggccgaggtgggtggatcattttgagcccaggagttcgagaccaccctggggaacatagtgagatcccccctcccccgccccatctcagtcaaaaaataaaatatttataaatgaaaaaagaaaaactctagaattctctttaatctttaaattttttaaaattatttttaattgtggtaaaatacaacataaaatttgccattttaactattttcaattccacatttcagtggaattaagtgcattcacgttgtgcaaccattatcaccatgcgtctctagaattctttttatcttgcaacattaaaactctgtagtcattaagcaataattccccagcctcttgcaaccaccagtctactttctgtctccataaatttgactaggtacttaatataagtggaatcatttgggatttgtctgtttgtgactagcttatatcacgtaacctaatatccccaaagttcatccatgttgtagttatgtcagaatttccttcctttttaagtctgaaaaatattccattgggtgtatgtatatctacatatgtatctatatctgtctgtttcagagtctgattagtcacacctagaacaaaaattttcatttaccacatcatcttttaatatctaatgttggcgtccttcatgaaaatttttttatgttaaggaatacatttttttgagtctgccttccagattattcaaatttgaaacttaaagaccatagaacagattttctggatttagcattttataatgtatcttccacattttacacaaaacaccggaacatattttgctgtgttctgttaaggccttgtgaaataacataggaggtatatgatcttaaatctagtatacaacatttcttattctatttatactgcttcccttgccattaagaatatagcccaaatcagtgataaaacttaaaataattaaaaagagcaaaaacagatttctagtcctcctctcacacctcctaaatctgtggaatttctgggtatggaccaaaggatctgtatttttagagttcttgggttgcttcttaagagtaactatgtttaggatgtggcctaagtatttaaggttgtcatgaagtagcttaagaccaaaggtttaactgtatttcctgataggtataggtattagtgaataaggctcttagtaaactatgtaggaaaagatttttgtactgcttggtttttttctgtgaacttttatatataatagctaattattcactagcattttagagtctgcatttaggaacttaaatctcagaggaattacttcatttgagttaaaccctaacatttggtaatagaaatgagccaaaaacacaacaggtgaactttatggtatataaattatatatcaataaaactgtattaaaaaaaagaaaggttggacttttgaagaaaaatcactgaatatggtatatagttatcaacatgattggtgtatggttgtaaaattttaatgagtcattaatgataaattttatcaaactcaaatttgtcttacctaccttgagtgaaataattttgtaaattatataattgagttgtaaactataggcatgacttggagatattgtgggttttgttctcaaccactacaataaagcaaatatcataataaagcaagtcacatgaattttttggtgcccagtgcatatgaaaattatgtctaggcctggcacagtggcttacgcctgtaatcccagcactttggaaggccgaggcaggcggatcacttgaggtcaggagtttgagaccagcctggccaatgtggtggaaaaccctgtctctactaaaaatacaaaaattagccaggcatggttgcaggtgcctgtaattccaaggtacttgggaggctgaggcaggataatcacttgaacccaggaggaagaggtacaagaatcacttgaacccaggaggcgaaggctgcagtgagtcaagattgtgccactgcactccagcctggacaacaacacaagacttcatctaaaaaatatatatatatatatgtccatgctatactgtagtaccgtagtccattaagtgtgcaataacattttgtctaaaaaagacagtgtacgtaccttaattttaaaatattttctttcttttttttttttttttttttttgagatgaagtctcactctgtcgccaggctggagtgcagtggcgcaatcttggttcactgcgaccttcgcctcccgggttcaagtgattctcctgcttgcctcccgagtagctgggactacaggtgcccgctaccacgcctggctaattttttgtatttttagtagagacggggtttcatcatcttggccaggatggtctcgatctcttgacctcgtgatccccccacctcggcctcccaaagtgctggaattacaggcgtgagccaccgcgcccagcttaaaatattttatttctaaaaaaaagttaatgataatttgagccttcagcatgtcatactatttttgctggttgagaatcttgcttccatgttgatggcttctgactgatcagggtagtggttgctgaaggttaaggtggctgtggcaatttcttaaaatctgacaacagtgaagtttgcccatcagttttctctttcacaaaagatttctctgtagaatgcaatgatgtttgacagcattttacccatgataaaactttcaaaattggagtccatcctctgtaactctgttactgctttatcaactaagtttatgtaatattcagaaattactttctttgcccatctattacaaatagtttctcatccactcaagttttatcatgaaattgcagcagtgtagtcacatcttcaggctccatgtgtaattccagttttcctgctgtttccaccacatctgcaattatttcctccactgaaatattgaaccccccaaagtcatccatgagggttggaatccacttattgcaaactcctgataatgttgctaatttgccctcccatgagtcggaaacgttcttaatggcatctagaatgaattatttccagaagattctcaatttactttgcccatatccatcagacaaattgctgtctatggcagctatagccgttgtgtgttttttttttttttgagatggagttcattcttgtcgcccaggctggagtgcaatggcatgatctcggctcactgcaacctctgcctcccgggttcaagcgattctcctgcctcagcctctcgagtaactgagattataggcctgcatccccatgcctggctgatttttgtattattagtagagacagggttttgccatgttggccaggctggtctcgaactcctgacctcaggtgatccacctgcctcggcctcccaaagtgttgggattacaggcgtgaaccaccatgcccagctgctatagcctttctttctttctttttttttttttttttgagatggagtttcgctcttgttgcccaggctggggtgcaatggcactatctcggctcaccgcaacctccgccccgctgggttcaagtgattctcctgcctcagcctcccaagtagctgggattacagtcatgcaccaccacgcccggctcattttgtatttttttagtagagacagggtttctccatgtcggtcaggctagtcctgaactcccgacctcaggtgatccgcccgcctcggcctcccaaagtgctgggattacaggcgtgagccactgtgccctgctggcctttcttaaataataaggcttggaactcaaaattattccttgatccatgggctgcagaatggatggtgtattagcaggaataaaaacaacataaatctccttttatatctctatcagagttcttgggtggctaggtacacgggcaaagaccagtaatattttgaaaggaatctttctgagcagtaaatctcaaccgtggccttaaaatattcactaaaccatgcttaaatggatgtactgtcatccaggctttgttgtttcattgaacaagcacaggcagagtaggagttttggaatggtaaatgtgcattgacttcaacttaaaatcacaagctgcattagcccctaacaagagagtcagcctgtcctttgaagctttgaaaccaggcatttcatagttgctctgtagccatgaaagtcctagatggtatcttcttccaatataaggctatttcatctacactgaagatctgttgactgggcatggtggctcacacctgtaatctcagcactttgggaggccaaggtaggtggatcacttgaggccaggagttcgagaccagcttggccaacatggtgaaaccccgtctctgctgaaaatagaaaaattacccagatgtggtggcaggaggaatgcttgaacccaggaggcagaagttgtagtgagccaagatcatgccactgcactccagtgtggatggcagagtgaaactctcaaaaaaaaaaaaaaaaaatctgttgcgtaatgtagccaccttcatcaatgacacattggctagatcttctggataacttgcatgtagcctctacatcagtacttgctgcttcaccttgcacttttctttctttctttttcttttttttttgagacagagtctctctctgttgcccaggctagagtgcagtggcactatcttggctcactgcagcctccgcctcctgggttcaaacgattctccttcctctgcgtttcctccctagtagctaggactacaggcacgcatcaccacacctggctaatttttgtgtgtttagtggagatggggtttcaccttgttggccaggctggtcttgaactcctgacctcaagtgatctgtccgccttggtctcccaaaatgctgggattgattataggagtgagctaccgtgccggcctaccttgcatttttattttacggagataatttctttccttaaacctgatgaagcaacctctactagcttccaacttttcttcttcagctttctcacctctctcagcctttgtagagttaaagagagttagggccatcctctagattagactttgttttacgggaatgttgtcgctgatttgattttctatccagaccattaaagctttcttcacatcaacaataaacttgttttaccttcttatcattcatatattcactggagtagcactttaaattttcttcaataactttttctttgcatttacaacttggctatttggtgcaaaaggcctagcttcaaagcctgtctcagcttttgacatgcctttctcactaagcttaatcacttgtaagttttgaattgaagtgacagatgtgtgagtattccgttcacttgaacacttaggggtcactgtggggttattgatggcctaatttcaacattattgtgtctcagagaatagggaggcccaaggaaagggagacagactggggaatggctggctggtggaactgtgagaatacatgtttattgattaaattcaccatcttatatgggcacagttcatggctccccaaaacaattacaatagtaatgtaaacaattactgatcacagatcaccataacagatataataataatgatgaaaaagtttcaaatattgtgagagttaccaaaaggtgacacaaagacatcaagtgagcccatgctattggaaaaatggtgctggtagacttgctttgacacaggattgctacaaaccttcaatttgttttaaaaaaaaaaaagtaacatctgtgaagtacaataaagcaaagtgctgtaaattgagatatgcctgtatatgaatgttatttatttatttatttgttttatttttgagaccgagtttcgctctgtcaccaggctggagtgcagtgtggctcgatctcggctcactgcaacctccacctcccgtgttcaagctattctcctgcctcagcctcccgagtacctgggactataggtgcacaccaccacgcccagctaatttttgtatttttagtagagacacggtttcaccatgttggccaggatggtctcaatctcctgaccttgtgatccacctgcttcagcctcccaaagtgctgggattacaggcgtgagccactgtacctggctgaatataatttatttaaactttttaattttgacattttatctaaaaatgaccatattttgggaggccaagacaagtgaatcacttgaggtcaggagtttgagaccagtctgagcaatgcagtgaaaccccatctgtacaaaaaatagaaaaattagatgagcatggtggtgtgcgcctgtagacccaaatacttgggaggctgaggtgggaggatcacttgagcccacaagatggaggttgcagttagctgagattgtgccactgcactccagcctgggtgaaagagcaagaccctcccaataaataagtaaaaccaagcaaagttgcatgttcttgttaactcttctaaatttagtaattacttttattcttatataactttctgaggaaaagtcctgttcataattctttaccttttttctccccacagaaatggcaggatattattaaggaagtcaagtttctacaaagaataaaacatcccaacagtatagaatacaaaggctgttatttacgtgaacacacagcatgggttggtatttgttctccccttgttgcagttttagctgattttggtttataatgaattaattcagaatatctcatactggttgtgtaaatgcatgcaaaaacacctgaaatgttagttcgtactgaaagaaaacaagcaatatttcctagaacttgtaggcagtaagagataatagaacttttgcaagtctcactgcagagatttttcagaattctgttgacctttgtatgtatgataaaatgtcctatgacagttttagtagtaccattcaaacattgtgaaaacaatcatgttacttgaggttgaaagttagcatatgttttcttgacataaatgtactgtaatgcatttaaccagaaagatcatgatgaaatttgggtgaatcctggtgaaatttgagctgatcacgattccttggtcgaataacactaaagatagagaattgttgcactttattataagaagtagaaatttattttgcccttttgttaccaggaatggccccttattttgaataattaataagtcacagctaagtatcattttagtatacgtactgtagatttagatttgtagtgtttggtgcatttttatccagtttgttttggtagtggtagtggtgacttgtaaaattgaggctatgattaaagaaaaagtaacattagatgggtaacctctctgcctctcagggttctccaaccataaaacaaggatactaataggacctacctcataagattattctgaggattaaattggttactatataaaaaatacctggcacataggaggtgctctgtgtttgctttcaaagaaacagttgtaacctaagctttgtatagtttttcctcagtatctgtgggggatttggttccaggacacccacccccaggataccaaatcccttctataaaatggagtatctgcacataacctgggcacatccacctattattttttcaatcatctgtagattagttataataccacaatgtgaatgccatgtaaatagttgttacgttatattggctttttgttttatttttattgttatattgtcattttttaaaattttatttatttatttattttgagacagagtctcactctgtcgcccaggctggagttcagtggcgcaatcacggctcactgcaagctccgcctcccaggttcatgccattctcctgcctaagcttcccgagtagctgggactgcaggcacccaccaccacacccagctaattttttatatttttagtataaatggggtttcaccgtgtgtgccaggatggtctcaatctcctaacctggtgatctgcctgcctcggcctcccaaagtgctgggattataggcatgagccaccgtgcccagccaatttttttattttttcaattatttttgatatatagttggttgaatctacaaatctagaacccacagatgtgaagggctgactatacatataattctagagaacacagttttctgtcttctaacgatgatcaatattgttactataggtttgtagtaatggaatagtacatttttaagaaatagtgtatttctttataattttaattagtaattatatatgaaatacacagcttatagaagtgattatatgttggcattattaaaagattaatgtatcattggcttgactttatgcatttaacaaatcactgaatacataactattttttattaaaaaattttaaaaatatattattctgagtaatatctatataactatttttttaaggtaaatggtgactagaattttacttcaaactatgttcttgatctactgtgtgaacttattttatcttaaatttatattaaatctttataataatatattttaatgcttttataacttttccatgtagcttgtaatggaatattgtttaggatctgcttcggatttactagaaggtaagttccctttgattattttttaaaaagtattcacagaataaaatgataatttagacattatttaaatgatattaataccaaataatgtaaaactttccagaaagagcagaactcttagtcttgttcaaattctcagcatggtatatgctgtccttattaaatattatatgttatacagtagcttaaaatagtcatgttttctcattgtgactttacaagtatttttctgaattctctgtcattctgctcctcttgttcaaaccaaagataagtgagaataaagagagaactctgttactattgtttttacatcaccaaataattatttaatatcgttagctaagagaagaattggctatgaactgtactttaacaactgacacaactgcatacaagttataaagtttaataatctttatcatcttggaaaataaatctcttcttgctaagtatcagtttttaaaaattgccccatgtattagatatgtatttttttaacaaaaatgttctgtgtattaattattttgaaataaattttaagttcacaaaaagccattacaagaagtggaaatagcagcaattacacatggtgctcttcagggattagcctacttacattctcatactatgattcataggtaagtgctttggaaattatatattgataagtaaatggcttgttgcatataccaactttagaatttattaactctaaagtttttattggttaaagccaaataaaataatataagctcatatttttttagatttttcatgtcctaaaatgaacatagttgtatactttatctcactaggataatttttatctttgcctatatgtgctgctggaccttgtaaaaatatgtatactttctagatttgtggtagaaatttagctatagaatcatttaatttgcaaactggaatgggcattagagaatcatacagtttttctttctcattttaccggtaaaatcactgatgtctcaatttgtgactaatttcctaaaggttgcaaagctgagtagatagagctagaactaaatctagatcttttgtcttcttggtaactgataatgacatatttattccattgattctatgacatggacgaataaaagctgcttaaggccaggcgaggtggctcacacctgtaatcccagcactttgagaggcctaggcaggtggatcacttgaggtcaggagttcgagaccagcctggccaaccaatatggtaaaacctcgtctccactgaaaatatgaaaattagctgggctttgttgtaggcatctataatcccagctactcgtgaggctgagagaagagaatcacttgagcccgggaggcggagtttgcagtgagctgagattgtgccactgtacacactgtacactgtaccactgtacagcctgggtgacagagtgaaactctgtctcaaaaaaaaaaaaaaacagaagctgcttaagactccttatgcttttgagctgtggtccttgataatccttgataatggatagtaactttgaagttaaaacattttataatgtatttttggcactggtattggttctagctgttttagaagaaagttagcattttcttattacatatatgaaccaggcagtacattttaaactatataatagagtcattgtgagttaataggttatcattttttaacatgaggataagatctgagagatacccacaagctagtaaataagtgagttttaaactatataatagagtcattgtgagttaataggttatcattttttaacatgaggataagatctgagagatacccacaagctagtaaataagtgagtgccatagttggaatttcaacctaaggttttctcaaatttaagatacctctccatttaaaaaaaatcaaatggaggaaaaatagattcacttcgtgttatgctctaaaatattatagtgagaattaacaagggcttggaaattcagcactttaatttctattttaatttttgaatgattaagtatatattataatgctaattagatggacagtcttattatataaatacatgttttcttagtttatatagacagtatgtttgctatttcagaaaagtaaatttgggatcattgatactacattatccatatatttcagtttttattttatatttaggaaaactatgctgacgtttggaaatgatacgaatacatctttatgtatttatttattttgaataagtcttttaaaaagtttggagaataaggttcttttatattttcttttttgtttttaagttaagtatggatactcagaaatcttacgtatgatgaagagattgtttgctaattgcaatatattttaaaaaccattgtttctaccaataaacagaaactaaaatataaactatgctccaatgaactaatttttttttactgctatttgtcttctcttttagaaaattattactatatgtttatttgaattctgtagttttttgttttctaatttgaatattaattctccttatcccaattgtgagattaccccagcacttaattattttgatttctctttctctatcctatgaattcttgttttatttttatcgttttaaacataatctattgagggaaagttaagtaattttctgtattccctaaacctagagatatcaaagcaggaaatatccttctgacagaaccaggccaggtgaaacttgctgactttggctctgcttccatggcatcacctgccaattcctttgtgggaacgccgtattggtaagaatagttaaagcagtcagcagctgttttaagtgtctgtctatgtttaacatgaaatacaaatgaagtgtaaggtaaagtactgtcaggaatgttaaactcggccaggtgcaatggctcacacctgtaatcccagaactttgggaggccgaggcagacagatcacttgaggtcaggagtttgagaccagcctggccaacatggtgagaccccatctctaccaaaaaatacaaaaattagccaggcatggtggtgcatgcctgtagtcccagctacttgagaggctgaggtaggagaatcacttgaacccaggaggcagaggttggagtgagccgagattgtgccactgtactccagcctgggcgacagagtgagaccctgtctctcaaaaaaaaaaaaagattaaaattttaaaaaaagaatgtaggacactaattgaagacatgaattagtgattagtgcttcatttacaaataagatgcccataagattgataattgtgtgattgagttgcaagctgccctagccacttttatcatggagcaccatttttatttgaaagaaagacacaaacaaactatgattattcagtcttggttattgtggcagataattttctttaataaatgacatgagcttataacttcaaggaaaacaacggacaatacttgttgccaatagtaaaattcaatcttttaagcaaaaattagactttttttttttttttgagacatagtcttgctctctcgcccaggttggagtgcagtggtgtgatcttggctcactgcaacctccgcctcttaggttcaagcgattctcctgcctcagcctcctgagtagctgggattacagacagcagccaccacacccggctaatttttgtatttttagtagagatggggtttcaccatgttgctcaggcttctggaacttctgacctcgtgatctgtccacctcagcctcccaaagtgctgggattacaggcgtgaaccactgtgcctggccaaaaaatagacttttgtaatgggatcctgagaccaaaatatttgagaaccactggcctaaagtatatgaaatattataatctgcaaacttgagcagatgcaaaatataattctgccttgggagcctctttcttttggggtggctgttacatgataatgatggatagtgaaaataaatctcacactatgggccaggtgcggtggatcacgcctgtaatcccagcactttgggaggccaaggcgggcggatcaccaggtcaggagatcgagaccatcctggctaacacggtgaaactccatctctactaaaaaatacaaaaaattagccaggcatggtggcgggcgcctgtagtcccagctactcgggaggctgaggcaggagaatggcgtgaacccgggaggcagagcttgcagtgagccgagattgcgccactgcactccagcctgggtgacagagcgagactctgtctcaaaaaaataaataaatacaataaataaataaatacataaatctcacactatatatgcattgctaaatatttacctcacaacctgtaatgcacttagttcccgttataaaaattcttatgtccagatatattggctagaattcaaaccagtgatctccatgtagatgactgttacattctcaaaggatagaatactttttaaaaaaaatctttaatttaaattaacgttttgttctaggatggccccagaagtaattttagccatggatgaaggacaatatgatggcaaagtagatgtgtggtctcttggaataacatgtattgaactaggtaagcattgttcttcattactatggattaagttttgatcaatgttttacctcaatttctgtaccaatctataaaaattatagatttttatcttaaatgtcactttataaggggggcaatacatttattaaggttttcactttggttatttggtaagttttatttatattagggttacctatattatatttgctctgttccattatatctaaaataattttccactgtggttttaattaagtttgaggaatctatgtctaacattaatgagtatttgttaaacacctagaatatgtttatgattaccagatttaccagctatagaagatctgtaagccattcataactagctggggtagttactactttttttttaattagggatgaaattagatgtcagactgtcatacctacataccattttgtaacagtttgatatatatatatatacatattttttttttttaagacggtaaggccgacttcattcaacaggggccatgatccataggtatatgcatcactgtagcagggtcttgcaatgagagagagagagagattggactgaatttcctgtagcagtttgattttaagcacacattttgttaagttgttcataaatagaactgtgctaaaaagagtggaccatcataacttctgtgagccaataaactgtcactgtaattgaagatgctggccgtcttcttgctctggatttcccaatggaggtctaccagcccaatagtcttttcctttttatcttcttataagagcattgcattaaattttacttatttatttatttttgagacatggtcttgctctgtcacccaggctggagtacagtggtgcaatctcagctcactctaacctctgcttcctgggatcaagcaatcctcccacctcagcctcctgcatagctgggactgcaggcacacaccagcacaccaggctaatttttgtatttttagcagagacagggtttcgccatgatgcccaggctggtcttgaactcctgggctcaagctatcctcctgcctcagcctcccgcagtggggggatttcaagcatgagccactgcgctcatctaaaccattctaaaaggagtgactaaggatggaaaataatacattaaaagtaaaatctgttggtaattttgattaatcattatctactcgagtttgtcagtagttttctaaaataagtatagggaaaatgaggtaaaatgaaggtaaaatcttgcttattattacacagtagattaaagttacgatttctattacaaccagactaccttgcagtccagttttttttccctaaaatgtaatctttaagtattttcacttttgttggaattcctctgttaactactcccttcaagctccacatcctgctgctgtttgttttatagtttaacaacatcaacaaacagagatttggagattaccatgtcatacttgggatttctttgtcttaatttgaagtttgcaaaactgtttcttccatttgaaagtacctttaggtgtcctaaactctaatctctattcttttacctatgattctttttcctacccataggtcctaatttaatttcttaagaagcctgggtatacatgtacagaagctggttaatgtactctttgcccatggggtccttttacattcttaatgctggccgatgcatacatgtgcccctcagtgatagtgaaattgcattaatggacctgctagatttcattgatatattttaagatttatttgattagaaggtatttgttggctcattgttgtgcttagaacaaaatctacctaaactttgtagtttccgtgaaatggcttctcctttctagcttctttttattctacttcataaaagagttccttcacaatagaagtttttatacttaaaggaactttagatgtgactgcctttaaataattttgcatgggagaaatatttgaaataatttcttagaattttaggcattcatttggtatcttcacttttgtaatctttcataataactttaaacattttacttacaaatgttttgaatattttgaagtgctaagtcaggaactatattttaagcctgattatggttctaggtgaaaggtctaaagtagcacaggccaggaaaactttctgcagtgaaggaagtgttctgtagctatggcttttcagctaaaggagtgaattttctaaaattttatttaaatacatttgcatttaaatagtcacatgtgctagttagctacctttttagataacacaggtctagaggtatgattttcgttttttttcttttctttctttttttgcggggtgggagggagacagagtctcgctctgttgtccaggctggagtgtagtggcacaatcttggctcactgcaacctccgcctcctgggttcaagggattctcctgccttagcctcccaagtagctgggactatgggtgcctgccaccacgcccagctaatttttttatttttagtagagataggttttcaccatgttggccaggctggtctccaactcctcacttcaggtgatccacccacctcagcctcccaaagtgctgggtttatagatgtgaggtatgattctcaatgcaaatccgattcagtcttgggacacatatttatgataatatccttttctactttggaagagttaaggatagcaaattaaagcaaaccattttcttacagtataggtaatagaaaaaatttacatcaattttaccattattggtcttgataaacatagttgtgaatagatatgactcttgctttagtgtcacaaaggttgaaattacttggttatgtcttaataccaagaaatcttataatacataatttttcatgagtgggtttgcttacatgtttctttatagttaatctgatgaaaattcttagtttgttattcaagctgcatgattatataatctttataaaaatataatttaccatttttaattacataaatatatgtttagggtataaaattatagaaatacaaaaggagcgaaaagaaaataaattattcatagttctactctcagctggatacagtggcttacatctgtaatcctagcactttgggaggccaaggcggaagaattgcttaaagccagaagtttgagaccagcctgggcagcatagcaagaccttgtctctaccaaaaacaagacaaataagctgggcatggtaaccccacacctgtagtcccagctactcgggaggcagaggtggacgaccccctttagcccaggagtttgaggctgcagtgagctataattatgctactacacttcagcctgagtgatagagtgaggccctttctaaacaaacaaattaattaaattaaaataaaacaggaaacaaaagtacacatagtcatttttcccattgagaggaataaatgaaaatagtaaaatttgaacccatttatctcaccctttggtgattactcttctgtataagtatatataatttgaactctttctctggaaattttatcactggacattgtttctgagatttactttttagaccgttcagttcttctatctcagtttcatctaatttcctcttgagttttggaggtattaattttacagaagcaatccaaatttatgggtagagacgttttagaaacatgcacaagataataagaaatagtatctctaacttaaaataaatttggtttaaaattaagtggtggctcatgcctctaattgcagcactttagtaggccaaggtgggaagatcgcttgagcccaggagttggagaccagcctgggcaacatggagaaaccccatctctacaaaaaatacaaaaaaaattaatttggcatggtgacatgcacctgtagtcccagctgctttgggggctgaggtgagaggatcacttgagcccaggaggtcaaggttgcagtgagctaagatcgcgccactgcactccagcctgggtgacagaccaagactttatctcaaaaaaagaaaaaaaagtttagtagtagcttataaaaatttgagataaaaaatatttggccgagtgcagttcagtggcttatgcctgtaatcccagcactttgggaggccaaggcgggcaaatcacttgaggtcaggagttttagaccagcctggccaacatagtgaaacctcatctatactaaaaccgcaaaaattagctgggcgtggtggcgcatcccggtaatcccagctacttgggagactgaggcaggaggatctcttgaaccggggaggcggaggctgcagtgagccgagatcgtgccacttcactttgatctgggtgacagagtgagatctgactcaagaaaaaaaaaaaagttatttgaatttatgagagtctaacacattgtaaatttggtgaatctcttctgtgatttttaggcaagtttaatgttctttgataaaattgagagatttttaatttaatagtgaatgacaaaattaaaaagatatgttctagtttgatatattgacggtataccatttaaaaggcttggtgaccaagaggtgaagtggaatggggattcagaatttgaacagagaaaggagggcatctgtttaagcagagagaagatggtcacaaagatgggatattggttacataggaggaatttatcagatagaaaaatatattaagggccagttgctgtggctcatgcctgtaatcccagcactttgggaggccaaggcgggcagatcacctgaggtcaggagttcaagaccagcctagtcaacatggtgaaaccccgtctctactaaaaatacaaaaattagctgggcatggtggcccatgcctgtagtcccagctcaggaggctgaggtaggataattgcttgaacctgggaggcacaggttgcagtgagccaagattgtgccattgcactccagcctgggcaacagagcgagactgtgtctccaaaaaaaaaaaaaaaaaaaaaaaaaaaaagtattaaggataatgagagcagggtttctctcattgtcagagaaagctagaaataaacactatggtgttagattggaatttgagatattgtagtaaatttattgttttcaaatataagtattcaatatacatcatgtatttgtacagataggtgtataaatgtattatgtacatgtatatattcccaactctgttcattgagcgtgtctgagagcagtgacaccccagtagcagtaagcacacctagcacaacagccccttggagaaatgattgatccagggtctgggctagggaaagcacaagatgaagctaggacatcttagtgtaccagaaagcaagaaagtaaccaaataataatggggccatgtccaaaagacacaagccagtttaaaaaggtttctactgttcaaatatgggataatttgaacatcaaaataaatgatataacttattaaataaaataaaaatctgtgactccatacaataaataaataaaagaataaagttgaaagtttcatgagaagcagaatatttatgtagattcagagtaccatcttacaaaatgcttattaattacaaaggagaaaagagaaactttatcatgaagaagactggcagacatgggccttaaccaagtgatcaaaatgaataccatcagtaacagaacttctcaaaatcatgtgccgcctcataggatataaattatagcattacctctgtgatactcctgccaaaggtgtttagcctaactctaataataggaaatgtcagaaaatctcaaactgagggacattcaggagtcctgtatatctcagaatcttcagaggattggttccagaaccccctcagataacaaaatgtgcagatgcttaagtctcatataaaacggtgtagtttttgcatataacctatgcatatcctaccatatactttgaataatctctggattacttataatacctaatacaatatcaatgccatgtaagtagctgtcttaaaaatttgtatttttggctgggcgtagtggctcacacctgtaatgccagcactttgggaggccgagacgggtagatcacctgaggttgggagtttgagaccagcctgatcaacatggagaaaccctgtctctactaaacatataaaattagccaggcgtggcagcgcactcctgtaatcccaggtactcgggaggctgagacaggagagaatcgcttgaacccgggaggcggaggtagtggtgagccaagatcgtgccattgcactccaggctgggcaacaagagtgaaaccacatctcaaaaaataataataataataataataataataataattgttaattttttaattgttaaaacaattttttttcgccaaatattttcagtctatggttgaaatatttcggttggttcagtctgtggatgcagaacctacagatacagaaaggcgaccatacttcaatttgtcaaagtcatgacttcaacttttaccttaaactaaaacagagcaaattgaacacaaaataagcagaaggtagaggataataaagatcaaagcagagatcagttgaatagaaaactgaaaaacagtagagaaaatcagtgcggatattaaaagagtaatggggaaatatgaacaattttctgtcaataagtttgacaccttggataaaatgaacaaattccttgaagattaacaatactcaaagctcattattgctacatgggatattattgggacatctgaatgaaacttgaatgtagtttgaatgtagtgtagtcttatatcactattaaatgacctgatttaatggatgtattacgatgctttaggaaaatgttcttctttacaggaaatatacactcaagtatatattaagtatggtgaggcttcaggtcagcaatttattctcaattgattcacttgaagaagttcttggaggctgggtgcagtggctcacacctgtaatcccagcactctgggaggctgagttgggaggatcacttgagctcaagagttcaagaccatcttgggcaacatggtgaaaccccatctctacagaaaatacaaaacttaattgggcatggtggtgcacacctgtggtcccagctactcgggaggccgaggtgggaggattgcttgagcacaggaggtcaaggctgtagtgagccgagattgtgccactgcactccagcctgggtgacagagcaagaccctatctcagaaaaaaaataaaaaaaaagctctttgaactctacttgcaattttttgtgtaagtttaagattgtttcaaaataaaatcatttaaaaaaaaaaaaggaaaaacgtgcccaggacttgagtacccctggaacctattttaacaggaatgtttcctttcttttacagcggaaaggaagcctcctttatttaatatgaatgcaatgagtgccttatatcacatagcccaaaatgaatcccctacactacagtctaatgaatggtgagtattgttaatatatatattgctcagtgttgaataaatgaaatgctttttcataatctgttatcaaagtgatttaatttcagttaggtaaaatgtatcaccttataagatattaaaatagatgtattttacccttttaaatatatttattctttatcatgtttccatttcatggcatacgtataactgagttcagaaaaggatggatgatgtcacatgaatgcaaaaagtattcattttacaagaatttgtattttactttctctttaaatttaggaatacctaatcctaattaaataataaatagcatttaagcattaatattttataactaaaatatatgtattattacaacctatagtgatatttgattggagggatggtttataatttatatgatataaaaatataagtaaaatgatttgactttatcaaaattaccaggtaattaaaaatattgggatcactctaattatcatatttgttattcagttttatctgatattccttctaggacttccttgatttgttaaaatttagttcattcatgtaaagaggtttatggacaacagattgacaattttagaaaactaggatttttatcaacagtataaaactgtagtagaaaattaattcctcaggtgtacctagcattcgataaattctagggggatatttagcatatttaataaatattttgaaattcacagacatataaattaggggtacttaattatttaaagagtacataattatggcacattcatataagtctttgccacttaagaatgtgccatataactctagtaaactaataatgctaaaactctgtgccaaaagattctttctatataactctactttgtgtttagaattatatagaacgaatcttttgacactgagtttagtgttatggtatggtttagtacattttgtgctgctgtaacagagtatcagaggcttggtaatttataaagaacagaaatttatttctcactttctggaggctgggaagtccaggaccaaggcactggcaggttaggacctggtcctcctacttacaagatagtgcctttaactctgcatcctttggaggggagaaacattgtgtcctcacatggcagagagcaggagagagagaaccctctcccacaagccctttttatagcagaattaatccattcatgacctgaacaactcgcattaggccccacctcccaacactgttgcactggagattaagtttcaacatcagttttggagaaacaaaaacattgaaaccatagttgatacatataagtaaaaaatatattgaacacagactgtctttacactgtgtttgagacttggagatttataaaagaattcttgcctacaaggaacttaaaatcttatttgaatattggagacaaacattgatggagtaattatttactgccttactgaactcttgtcaataacactatataataatgtgttacagacttctaacgtttttaaaaatatcttaattggttttctaggtttaatggaagtcttatccatttgctcaggggcaccaaatactcaggtataaaaacactctctccagagcagatagagtgatattctgaaacatgctatatagaagaagatccaaggggcaaataagaaagagcttattataagaaaggcttagcaaaaaggaaaatagaaaggaatgttatcttgggtttgaaagaaaaaaaaaagtagataggcttccctcattttgcctcgatatagtaatatgagttgtgatatttaaatatgtaggagcaggattttaaagtaatctgtgtgaatttatctttggaaaatggtgaacattcattggttgctttagatagatcttcatagacttatatgaaactgtatagtctctgcttttttttaatcattccctttccatttcccctcccaccaataggcacgtgtcttgatttgtgaatgtatttttaaaggaaatagcaatgtgttcacttgatactttcctttacaataggtctgattattttcgcaactttgtagattcttgcctccagaaaatccctcaagatcgacctacatcagaggaacttttaaaggtcagttctattatagtttatttatttattttattttaagacaaggcctcactttgtcacccaggctggagtggcagtggcacaatcacgtctcctgcagccttgacctcccaggctcaagcgatcctcccacctcagcctcccaagtagccgggactacagacacatgccactgaacccggctaatttttgtatttttgttagaagtggggctttgccacattgcccaggctgatatcgaactcctgggctcaagtgatccacacctgcctcagcctctcaagggcttggattacaggcatgagccaccagttccattatactttaaatttgttcttacccctaagaaatgattgtaaagaatgtgttttattatttgattctgaattaggattaagtatactctactagtttttaataaaatactagttttttatgccgttgtttctgataacttttcttagatactaaatttttgtattttgtttttcaaattgattagctgctcttaccatgtctaaatagaatatgtagttaagtattcaaatagctcaatacttaatatgtgcaagaatataatcatgagttataaattttaattcatgtggaacaatgtcttatttcaaagttgataaaacatagcttagccaggcgcggtggctcacgcctgtaatcccagcactttgggaggctgaggcaggccgatcgcgaagtcaggagttcaagaccatcctggccaacatgctgaaacccccgtctctactgaaaatacaaaaattagctgggcgtggtggcgcatgcctgtagtcccagctactcgggaggctgaggcaggagaatcgcttgaacctgggaggcggaggtagtggtgagccgagattgcaccattgcactccagcctgggcaacaagggcgaaaccccttctcaaaaaaataaaaaataaataaatataaggttttatgtttttggatgaaacaatatggtaaatagtaggctgggcacggtggcccacgcctgtaaccccagctctttgggaggccgaggcgggcggatcacttgaggtcagcagtttgagaccagcctggccaaaatggtgaaaccctgtctttactaataatacaaaaattagctgggtgtgatggtggactcgtgtagtcccaaatactcaggaggcggaggcacaaaaagcttgaaccccaggaggcagaggttgcaatgagccaagatcgtgccactgtactctagcctgggcgatagagtgagactgtgtctccaaaaaaaagaaagaaagaagaagacaatattgtaaatagtggtacacatcaaactaaagaaaaagtaagaatggccgggcgcggtggctcactcctgtaatcacagcactttgggaggccgaggcgggtggatcacctgaggttgggagttcgagaccagcctgagcaacgtggagaaaccctgtctctactaaaaatacaaaattagccggacgtggtggcgcatgcctgtaatcccagctactcaggaggctgacgcaggagaatcgcttgaacccaggaggcagaggttgtggtgagctgagatcgcaccattgcactccagcctgggcaataagaggaagctccatctcgaaaaaaaaaaaaaaggaagaatgtgactggcttcttacatttgccaaatagaagcaaaagaagcctttctaactcaggtagtagtaacccagcccactagtatttggtgattagatcctaagtctgcatatattaatagtattcatttgcctggcccctagtgtatattatcacagccctatttgaaatgataggaaatagttatcatgagcttcttatcttttggactaattacatttctgttgcagtctatcataaagaaaaaaactaataaaaaaatttaatgtatgaagctatttatcatggaattaaaaattagaaatagctgccccaaattagagtaatggttaagtgatttgggcacaaacatttgatgaaatattctacaggcattatgtttatgagtttgaaataataataattattttttttttgtttttgagacagagtcttgctctgtcgcacaggctggagtgcagttacatgatctcagctcactgcaacctctgcctctgaggttcaagtgattctcgtgcctcagccgcccgagtagctgggattacaggcctatgcctccacgtcctgctaattttttatatttttagggtttcactattggctaggctggtcttgaactcctggcctcaagtgatctgcctgccttggcctcccaaagtgctgtgataacaggtataagccactgcgcccagctaaaataataatacttatgactgtgaaaattgaataaaatagtgtatagaggctgggcgcagtggtgtaattccaatgctttgggaggccaaggtgggagggtcacttgaggccaggagtttaactctaccccccaccccccaaaaaataaaaattagctggacatggtggtgcacacctgtagtcctagctgcttgagaggctgaggtgggaggattgcttgagcccaggagtttgaggttacagtgggctgtgattcatagttacaactctttgcataaaaaagaaataaatttgagctaacaaaggaggtaaaagttgtcttaagaattcaaggatagctgggcgcggtggctcacacctgtaatcccagcactttgggagggcgaggtgggcggatcacgaggtcaggagatcgagaccatcctggctaacacggtgaaaccctgactctactaaaaataccaaaaattagccgggtgtggtggcgggctcctctagtcctagctacttgggaggctgaggcgggagaatggtgtgaacccgggaggcagaggttgcagtgagccgcaatcgcgccactgcactccagcctgggcaacagagggagactccgtctcaaaaaaaaaaaaaaaaaaaaaaagaattcaaggatatttcgtagaactcaagggatggcagaatatgtctttctggaatttacatgctaactatgtatctacaaaacattttatacatagaaaatttatgaaaagtatattacaatgtaactgtgatcatcataatggtggaattgtttttttctactttttgtatttgataaggtgaaattatattaaatgctagtaataaaaaagtaataatttaatggcttttagtctgtgttagtattttataaagaatattgttcacgcagcatataaaggaacccaatatctagtgtctaaattcatctttcataattcaccatcattaaatacattcctgttgaaacaaatatgactcagagctgaacatgtcttttgtgtgaaatcatcagttcttagaatatgtaaaccttgagagctctgattggacttaattcttagtgtttagacccttcagttattttaactctgcatttttagttggccaacaaaaatattatgttcaaaataaagaaaaagaatagttatgtatgcacagagtatatgtatgtaaatgataattttataaatagaagaaatttaacagaattatatagctatagattacatgcattatctatcataggatattatctctagggtctgagaaggagtaccttgtcactaattgaaaaaaaaatcaaccttttaccttctaccctatctagcacatatttgttcttcgggagcgccctgaaaccgtgttaatagatctcattcagaggacaaaggatgcagtaagagagctggacaatctgcagtatcgaaagatgaagaaactccttttccaggaggcacataatggaccagcagtagaagcacaggaagaagaagaggtaagagataaaaaaatgactccaatattgaattttcacttttggtttctttccttatgcagcttgccctgccataatttaccttatataccaagggtttccaggttgtattttctcaacactggtcctataaaatcccagttaggaataaaaaaaggtccttttttcttggagaaataagaaaagttaaaaaaaaagttttttttaagtctttaatcatgttagattgcatgctctaaatccaacccctttatggtacacaatgtcataatgaaggttctgagaagtccttcgttaaagaaacttgttcatctttgtttagtctaggccttctctaatttcttgaccactgaacctgtttttttattttttaatttttttgtttattttgagacggagttttgctcttgttgcccaggttggagtgcaatgacatgatctcggctcactgcaacctccacctccctggttcaagcgattctcctgcctcagcctcccgagtagctgggattataggcgcgcaccaccacacctgactaatttttattttattttattttttgtatttttagtagagacggggtttcaccgcattggccaggctggtcttgaactcctgacctcaggtggcccacctgcctcggcctcccaaagtgctgggattacaggcatgggccactgtgcccagcctgagcccttttttgactgattgtccagttccatatgatgtgcttttggaagttcttgaattacagaatgtgaaggttgaatgtactctctcagaagtcatgagaaagttagtaggcattcgactgtgtcaccaaagaaacttgatttcattccatctacacctttttttttttttttttttttttttaaagacagggtcttgctctgtagcccagtttggagtacagtggcacgatctcggctcactgcaatctccacctcccgggttcaagcaattctcccccttcagcctcccgaatagctgggactacaggtgcgccaccacgcccaactaattttttgtatgtttagtagagaccggtttcgctatgttggccaggctgttctccatctcctggcctcaagtgattcatctgcctcagcctcccaaagtgctaggattacaggtgtgagccaccgcacctggcctacactgttctaaaatactcattttacagataccaaaagcaaggctcagaataaattaagttgctcactgtaggtagaggaacatgggttcaaattcatacctcttttactctcaaggccaagttctgtgttgcctcttagggagaatggaaatacagatttgctatagaagtattacagaacttcctcatgaagcaatatacatattaagtatattatgtgtaaagctattttttccctctaaatattttgtttcttctttgccccgtcagaattcataaaattttattcttttctattgctttccatcgagagagaccactttgtattctgaaaccgtgctcaatactttcttttctctttttaatgtcactaaataaataatgaactgtcaaatataagactttataaacttacaatttttggtttggggattatttttagttcttaatgatagtcactagaaaattgggatgatttcagatatgtgaaatactttaataaagtgaaattaataaaattctatgtagttaaattgttaacaacatctgtgttaggctggggatgtaagaaaagtccctatctatatatgtgtctgtgtttattaaattctgcatatcttaaagaattctggtatggtaagactactgtaatgttagtgcccagatactacagctgcccgtttacatcagaaaaacattcttatgattgtgatttgaaacaatataatatgtaattgttagtttacacaagaagaggtaggaattaatgttaaattatttggtggtaaaaagataatctagagttccccaaaaacctattgaaatacaaaaaaaaaaaaaaaagaaagacaagaaaggtaatctagagactatgttttccagaagaaagaagaatctacttatgaaaggctgatttaataaagaagaataacaactacaatgaagtttctagtactttatttttttttaaatgctccttatggagcagggctacgccgtaggcactgtgcccagaatagccagtgctttttttttttaaaaggagagatttgtattaaccaagaattattgagaaatgagcaggatctctatatataccccatgagatgtactgtagaaatggttattttaaaatatcaagcaatttagataaaatattgtactttgaaaatcacccaaatctgatcagctgactttgttttagacagttggttgaatttttttgtgatttacttgttggtcatttttgtttttcaataaactaacagttgataaacttcctggtcttggaaaataaaagcaatttctcatgatagaccaactttctgagactgtctgccaagtggtatgctaggtgcttatagtcaagaattcagaagagagagatatatattaatatttgaactgaactgaatgtccttttctcttaggaacaagatcatggtgttggccggacaggaacagttaatagtgttggaagtaatcaatccattcccagcatgtccatcagtgccagcagccaaagcagtagtgttaacagtcttccagatgtctcagatgacaagagtgagctagacatgatggagggagaccacacagtgatgtctaacagttctgttatccatttaaaaccagtgagtatttggatttcaatgaaagaaattcaatgttggtaaactgttttcttcatctgttagtttaagagaaggaagaaggaagataaggaagtttcccgaagtttggaacatggctgggctcagtggctcatgcctgtaatcccagcactttgggaggccgaggcgggtggatcacttgaggccaggagttcaagaccagcctggccgacatggtgaaaccctgtctctactaaaaatacaaaaattagctaggcatggtggcacgtgcctgtactcccatactcccacctacttgggaggttgaggtgggagaatcgcttgaacctgggaggtggaggttgcagtgagccaagatcccaccactgcagtccagcctgggcgacagagtgagaccctatctcaaaaaaaaaaaaagtttggaacattttttaatggaaaaagccttgttaactcctaacctgttatctccatttggaaaattcatgttttgagaatacaaaaagaatgtggaactatttcaaaatattagaagaaaaagtacagaaacttcaaatatattatttgacattatttacatgaaaaataaaatactaaaaaataggaaggatacacataaaatgataatggttgcctttggggagtgagaaatggttgggatgagtgatgatcaaaagtgaattttatgttatccataatgtttatatctttttttttttttttttttgaaacggagtctcactctgtcacccaggctggagtgcagtggccacaatcttgacccactgcaacctccacctctcagtttcaagcgatcctcctgcctcagcctcctgagtagctggaattacaggtgtgtgccaccctgcctggctaatttttgtattcttagtagagacagggtttcaccatgttggccaggctagtctcaaactcctgacctcaagtgatccacctgcctcagcctcccaaagtgctgggattacaggtgtgagccactgcgccaagacgtttatatctttttttctttctttctttctttcttttttttttttgagacagagttttgctcttgttgcccagtctggagtgcagtggcgcaatctcggctcactgcaacctctgcctcctgtgttcaagcaattcttgttcctcagcctcctgagtagctgggattacaggtgtgcaccactatgcccagctaattttttgtatttttagtagcaaagaagtttcatcatgttggccaggctggtctcgaactcccaacctcaggtgatccacctgcattggcctcccaaagtacagggattacaggcgtgagccactgcacccagtgtatatcttaaaaataaagctgaatgtaattgtagaaaactgtagattctgggtttaggaaatgtgggtgtttgctgcattactctttacccttttgaatataaaatgttaaatcttctgaaaaatactggaaagtcaggtaactccttttaacaattaacaggaatgctaaggctgggagtagaggcccacccctgtaattctagcattttgggaagctgaggcgggcagattgcttgagcctggagttggagaacagcctgggcaacatggtgaaaccctgtctccgcaaaaaaatttaaaaattagctcggcatggtggtgcatgcttctaatctcagctactcaggaggctaaggtggtaggttcacttgaacccaggaggtagaggttttcagtgagccaagatcgtaccactgcacctcagcctgggtgatagagtgagactgtatctcaaaaaacaaacaaacaaaaaataggaatgcttcctttttcacttcacagcttgtgttattatctaaaagtagtaggtacaatggctaaaagatggaaacaacccaaattattcatcaacggatgtattaacaaattgtggtttataggccaggtgtagtggtttacgcctgtaatcccagcactttgggaggccgaggcaggcggatcatgaggtcaagagattgagaccatcctggccaacatggtgaaacaccgtctctactaaaaatacaaaaattagccaggtgtggtggcacacacctgtaatcccagctactcaggagtctgagacagaagaatcgcttgaacccaggaggcagaggttgcagtgagccgagatcatgccactgcactccagcctggtgacagaatgagactctgtctcaaaaaaaaaaaaaaactgtggtttttacatccagtagaatattactcagctataaaaaggaatgaagttccaatacatgctgccatatggttgaatcttgaaaacatgttaagtgataaaagcctagacacaaaaggacaaatattgtataattaaacttctataaaatatctaaaataggcaaattcatagtgacagaaagtaggttaggagttaccagagactgggtggaggtcaaaatagagagttattgctaatggatgcagagtttctgtttgggttgatgaaaaagttttggaagtaataggtgatagctgtacaacattgagagtataattaataccacttaaaatggttaaaatgggctgggcactgtggctcattcctataatcccagcacttggggaggctgattcaggagtatcacttgaggccaggagttcaagaccagcctgggcaacatagggagaccccatctgtttaaaaaaaaaaaaaaaaaaaaagaaaagaaaagaaaaacagccaggtgtggcatatgcctgtggccccatctactcaagaggctgagtagtggaggcacactgagtagtggaggatcagttgagcctgggagatcaaggctgcagttagccttgatcataccactgcactgcattctgggcaacaaaatggagaccctgtctcaaaaaaaaaaaaaaaaagattattcccacaattaattggttgctacttaactgatgttctcttcagctaacaaattgagttcagggaaggatatcagtccttcaattttttacaactgtttttgtttttgcttattttggacagatggcagaagtattaaaaagatagctccattgcttccaaaacccaagagcctttgagcaattaattttctgctactcctatttaaaacattgactatattggctacatgtttcatcagctttgttttcaagttatgttaaagcttttcaattttgcatataatcggtaggatataaatctagtcatgtgccaggcacagtgactcacgcatgtaatcccaacatattgggaggccaaggcaggcagattgcttgagcccagtagttcaagaccagcctgggcaacatggcagaaccccatctctacaaaaaatacaaaagttagctgggcatggtagtgcatgcctgtggtcccagctacctgggaggctgaggtgggaggatcgctagagcccaggaagttgacactgcggtgagccattgagtgtttaccactgcactccaacctgggtgacaaagcgagatcctgtctcaaacaacaaacaaatcaatcagtcaatctagtcatgtgcattttcttgtcctgagtctgtgtactattttataccctgtacaaataatttcttctaattatattgaaaataaagttggacatattggcttccacctgtcatcctagcactttggaaggccaaggagggaggattgcttgagcccaggaattctagaccagcctagtcaacatagggagaccttgtttctaaaaaaataaaattagcctggcctgatggcccgtgcctgtagttccagcttctcaggagtctgaggtaggcagatcgtttgagcttgggaggttgaagctacagtgagctatggtcataccactgtactccaatctgggtgacacagtgagaccctgtttctaaagaaaaaagaagaccagcatttctactttttggctttgctttttaaaattatgtctttgagattgattgatcaagttgtctttaaactttaatttccataaagattcaaacaaactgttcaccttacataatattgtctttttttttttttcctaggaggaagaaaattacagagaagagggagatcctagaacaagagcatcagatccacaatctccaccccaagtatctcgtcacaaatcacactatcgtaatcgagaacactttgctactatacggacagcatcactggtatgtacttacccgaattagagataaatatatttttcatgtgggaccttggcaatataaactcaagtatagctatatattgttttgtatttgggttttattttacgaaatactcatttaatatttaagtgcctattaagagaaagatgttattcaaagaactctgagaaatgttaaactaacaatgtcttcatgacacgtacacaaaaaacgagtatgttagaatatcttaaataagataactacaaggcactaaagaggaattcagataacttttgattaggagcataaatgaagtatttatgaaatagtttgagtatttaaaattagttggatttaggcacagcagggagaggagaaatgaatggtatttccatataagaagaatgtgggccgggcacagtggctcatgcctgtaatcccagcactttgggaggccgaagcgggcggatcacgaggtcaggagatcgagaccatcttggctaacacgatgaaaccccatctctactaaaaatacgaaaaattagccgggcgtggtggcaggagcctgtagtcccagctacttgagaggctgaggcaggagaatggtgtgaacctgggaggcagagcttgcggtgagcagagatcacaccactgcactccatcctgggcgacagagcaagactctgtctcaaaaaaaaaaaaaaaaaaaaagaatgtggacagtaaggaaatatattatgtggggctcaccagaaagaggggaatattggaaatggcaagcagtacaatgtggtatactctaaatgtcattctgattttccaaataatatggattatctgttcattacaaggatgctataatggggcacttaaaatcctaatcagacagataagtaaaaccaaagcatgataaaggatactaaggatacaacgaaattacattaagataccataagaaaagtaggctattagaaaacataatgtaaaggctgggtgtggtagctcatgcctgtaattgtagcactttgggaggctgaggtgggcggaccacttgagctcatgagtttgagaccagcctgggcaacatggtgaaactccatctctacaaaaaatacaaaattcaggtggggtgcggtagctcacacctctaatcccagcaatttgggaggctgaagtaagtggatcaactgaggtcaggagttcaagaccagcctggccaacatggcgaaaccccgtctctgctaaaaatagaaaaatcagctgggcatggtggcgtgtgcctgtaatcccaggtactcaggaggctgaggctggagaatcgcttgaacccgggaggcggaggctgcagttagctgagatagtccctctgcactccagcctgggtgacagaggtagaccctatctcaaaaaaaaaaaaaaatttcagctgggtgtggtggcatgtgcctgtagtcccatatacttgggagactgagtcaggaggattgactgagcccaagagatggaggttgcagtgagccgagatcacgccactgcactccagcctgggtgacagtgccagaccctgtctcaaaaaaaaaaaaaaaaaaaaaaggaaaggaagaaaagaaaagaaagaaagaaaagaagagagagagaaaagaaaggaaggaagaaaggaaaggaaggaaatgaggaaatgaggccaggcgtggtggctcacacctgtaatcccagcactttgggaggctgaggcgggtggatcacctgaggtcaggttgcgagaccaacctggccaacatggtgaaacctcatctctactaaaaactacaaaaattagctgggcgtgatggcgggcacctgtaatcccggctacttgggaggctgaggcaggagaattgcttgaacccaggaggcggaggttggagtgagctgagatcgcactattgcactccagcctgggcgtcagagcgagactctgtctcaaaaactaaaaaataaaaaaaagaaaagaaaatatgatggggaaaaaaagatatgatagctatctgacttctcaactatgtaataagcagatgttgtaaatcctatgctgtagttcatgaatctatatgacatgtggggtcgggaacatagtaccctaccataagtcaggttattcctactattctgcaacatgtaaataacactttgaacagagcaagtggtaaagattgcttaatttttgcatgactattttgataaatatgttgagaaggaccagctcaaaggaaaacctcttggtaacttggcataagttaaatgtttcccaagaaagtgttctctcccaaagtttggcttcctcaaatcaattaaggacattttaaatttatggatttaatgaatcaaaaatctgaaaaagatttatatttttaaagccagtagtttcatttacttcacttaaaatattcagagcataagtagttttttaatacaaataagcatagctatattattcattataagtgctatataccataacttagtctaccgtctcctgccttggatttttttcatacaataaaatgcacagatcttaggtattcaatttgaagagtttttacaattctatacacctgccttaaccgtctgaaacaaggtacagttatccctcagtatctgtgagggattggttccaggactctccacaaatcccaaaatccaccgataacccaagtgccttatataaaatggtgggccgggtggagtggctcacagctctaatcccagcactttgcgaggccaaggcaggcagatcacttgaggtcaggagttcgagaccagcctggctaacatggtgaaaccctgtctctactaaaaatacaaaaattagccgggcatgatggcaggcgcctgtaatcccagctcctcgggaggttgaggcaggagaattgcttgaacctgagaggcggaggttgcagtgagctgagattgcgccattgcactccagcctgggggacaagagcaagacttcgtctcaaaaaataaaaaaaagaaatcaggagttcaagaccagcctggccaacatggtgaaaccctgtctctactaaaaatacaaaaaattagctgggtatggtggtgcgtgccagtagtcccagctactcaggagcctgaggtgggagaatcacttaaacctaggaggcaaaggctgcagtgagctgagatcgtgccactgtactccagcgtgggcaacccaccgaccctgtctttgaaaaagaattgaaaacgttatcaacaagatgaaagataacaagtattggcaaaaaggggaactgttacacattgttggtgataacctaaattagtatggccattttggaaaatggtgtggaggttcctcaaaaaactaaaaatagaactaccatatgatccagtaattccacttctgggtacatatttaaaggaactgaaattaatatgttgaagggatatctgcactcccatgttcattgcagcattattcacaatagctaagtcatggaatcaacctaagtgcctatcagtggatgagtggataaagaaaatgtagcatatatacacaatggaataccattcagccttaaaaaggaaaaatcctgtcatttgcaagaacatgaatgaatctggaggattatgctaagtgaaataaggcaagcacagaaagacagataccacatgatctcacttttatgtggaatctagaaaaataaagttgaactcatagaatagaggtggagagtagagtgataagttactagaatttagggagagagagaaatggggagttgttgatcaaaatgtacaaagtttcagaaagataggaggaataggtttggagatcttttgcatagccaggtgactatagtcaacaataatatattgaatattttgaaataattaaaagtagatctcaaatgtctcaccataaaaaatgatgcataaggtgatggatatgttagattgatttaatttaatatgttgaatacatatatcagtatatcacatgtactccataaatgtatacaattatgatttgtcaaaacattaacattttttaaagcaattgaaaacaggtactcagacaagtgcatgtacacacagtcacagcagcagttttcacagtagccaaaagatggaaagaacacaaatgtccatcaatggatgagtggataaacaaattgtgctatatatgtacagtggaattttattcagctataaaaggaaatgaaatactgatacatactacaacatggataaacttcaaaaacatgctaagtgaaagaaaccagccataaaaactcatatgacactacttatatgatatatgcagaataagtatatctatagagacaaaaagcagattgatggttaccaggaggggagaatggagagcaactgcttaataggtatgggattttcttctgaggtgataaacatgctttataactagataaaggtgatagttgcatggcatggtaaatacactaaacatattgaattgttcactttaaggtgattaattttatgtcttgtattttatcttgatttttaaattgaggttttttttttgtttttttttttctttgtagtcagtgttttttgtgtcctgcccaagaagtatttgcttactccaaggttataaagatattttgtgtttctgctttctgattctgggttttacattcagttcaaatgatccttctcaaattaatttttatatatgacataagtgatatagggagtcaaggtttatttgttttttcctatgtaaagaaccacttgtttcagcaggatttgctaaaaacactatcctctgaattaacttgactttcttggtagaaaaatcaattgaacatatgtggatctctttctagtttttattctatttccttgatctacttagcctatcttaaagccagtatcacattgtcttgattactatagtgctgcatatcctccaaatattttttttcctcaagattgttttggatattctaggttcttttatatccccatataaattttagaaccagtcaatttctttaaaagacttgttggaaatttccttggaatctgctaacattgggatattttacactaattccctacttagttaatatagaattgtctaaaatgcttttcgaagaagaatgttttattttcttcttttccttacattatttgtatgtctaggttacgaggcaaatgcaagaacatgagcaggactctgagcttagagaacaaatgtctggctataagcgaatgaggcgacaacatcaaaagcaactgatgactctggaaaacaagctaaaggctgagatggatgaacatcgcctcagattagacaaagatcttgaaactcagcgtaacaattttgctgcagaaatggagaaacttatcaagaaacaccaggctgccatggagaaagaggtggcttattcagtattattactttgcttattttaggttttgaatgtctcagaattaaccaacatggcagtttgatgttagcgtatctgttcccgtgaaccaagcaaattggggaaaaggagaagcatttatgtgacttatataaaggtttctgtaaattgatattacaagaaagggtggcacctgtgtgttttatctctcactaattttgtgtgtgggtcatttaaaacaaatcagtcttaaaactgttcattggagtagtccactttatagtttttgtaatagccaacaaaattttgagtctgaaaaattgatgtgttttaatatcaagtactaggtctgggaactaataagacatgggaccatttcctgattattgatagttttgtagtgtcacaataggtaagttactcagttactttaagctttttgtttcctggttatctgaggagtttgctaaatctcctatcattaggtgatttaggtctcaaaaagtcacttttattctcttttttgtattttttggaaactacccttgaatttctggcagcattttaatatcagaatgatttaagattactgtaataaatacagataatgttgaagattataagttatgaaagattcagattcagattgagctcatttgattattgacaaataattgtcattattttacatgataaaagttagtttttaggatttttgttatgtgaaaccttttcttctaatgtttttggtgtcccattgttttactttttttgatagccatgtttgtcaagtagaatgtagacttctcagtaaattcacacaatatcattaaaatatgtccaggtagtctgcagtgaggcattatttatcatagctaccctcttctcccttttcacaaaaaaagaacattcttatagtagtagggaccctgacaaaataatttatagtataaatacatacttgattttgaaataatttgatgaaacaatgtatacatatttaaaatcctctgggcattggatattttcatttttttattttttattttatttttattattttttgagacagaatctccctctgtcgcccaggctggagtgcagtggtgtgatctcagctcactgcaacctctgctctccaagttcaaacaattctcctgcctcagcctcccaagtagctgagactacaggtgcatctaccatgcctggctaatttttcatctaccatgcctggctaatttttgtattatttttattttagtagaaaaggggtttcaccatgttaatcaggctggtctcaaatccctgacctcaggtgaccttcctgcctcggcctcccaaagtgctgggattatagatgtgagccaccacacttgatagatattatttttaatagcttgggaaaaggcgatactaacatatttaggaaaacaattcctgaagcagatatgcaatgtggtaacaaatttgttttaaaagtatataaccaggatgggtgcagtggctcacacctgtaatcccaccactttgggaggccgaggtgagaagattacttgagcccaggagttcaagaccagcctgggcaacatgggaagactctgtctccacacacaaaaaaaataaattagctgagcagggtggcatacgcctttagttccagctactcaggaggctgaggtgggaagatcacttgagctcaggaggaggctgcaatgagccatgattgtaccactgcactccagcctgggtgacagagtgagaccctgtaacatattttttgagacaggcactcgccctgttacccagctggtcttgaactcctgggctcaggtgatcctcccacctcagcctctcaaagtgttgggattacaggtatgagccacaatacctacttaattatatacatgcaaatatatgtgtgtatgtgtatgtgtgtgtgtttgagacatgaacatttatagaaaaaattagaggccgggcatggtggctcacgcctgtaatcccagcactttgggaggccgaggtgggtggatcacctgagctcaggagttcaagaccagcttggccaacatggcaaaaccccatctcttctaaaaatacaaaaattagccaggcgtggtgtcacacacccgtagtcacagctacttgggaggctgaggcaggagaatcacttgaacccgggaagcggaggttgcagtgagccgagctcgtgccactgcactgcagccagggtaacagagcaagactccatctcaaaaataataattttaaaaaaagaaaaaattgcaaaagatatgcaccaaaatgtttacattggttatctctggatgccaaaattatgtaagatgtttcttgtttttctgtattttgtaaatattctacaatgaacatgtattgcatatagaatcagaaataaaatatagcatttgttttgttttactgagggattgagggttgggaggaaggtatacttctgttaaatgaaataaaaagttgacaacatttttgaccctgtaagagatcaacatttcaaagatgagtttcatcttactgattctatgaagttcaaattataaggatgccaagtagcacatgtttataatttggttcagtcttttattttggtaatgtttctaatgatttcttgttcttagaaaataaaaggtattcttaatgatgtatattaaaccactactttatctacttaactaaatttgattcattttttaaacttcatataggctaaagtgatgtccaatgaagagaaaaaatttcagcaacatattcaggcccaacagaagaaagaactgaatagttttctcgagtcccagaaaagagagtataaacttcgaaaagagcagcttaaagaggtacttatgtcataaaactttccaagcaaattttctgcttattaattatatccaatggtgaccaactcatagaagcattaggataaaattatcttttgttgtttatggtcactaaatgggtattagtttaaatgatgacattgattataatcagttacccttaactgagtcatttagttgagtaggatttaaaatgaatcatttcctgaaaatatactttttttatgtttttattttatatttatttatttatttttgagacaaagagtctcgctctgtcacccaggctcgagtgcagtggcgcgctctcggctcacttcaagctctgcctactgggttcacaccattctcctgcctcagcctccctagtagctgggactacaggcgcccaccaccacacccggcaaacatttggtattttttttagtagagacggggtttcaccatgttagccaggatggtctcgatctcctgaccttgtgatccgcctgcctcggcctcccaaagtgctaggattacaggcatgagccatcgtgcctggccttatgtttttattttttgtgtgtattttttgagacagtcttattctgttccacgggctggagtgcagtggcacaatcatagctcactgcagcttcgacctcccgtgctcaagcaatcctgctttagccttccaagtagctgggaacacaagcacacaccaccactcctggctgatttttaaatttattttttgtagagacagggtcttgccatgttgcctagtctggtctcaaactcctgggctcaagcagtccgcctacctcggcttcccaaagtgctgggattataggcataagccaccgcacctgatcacatttattactttaaaagtaaacaataatgtcttacttttggatcagaagattataataatttgtttttatgccaatttaaatgtagaataagggagatatttgcttatcaggttttttttaagtagaatatgctgattatttctttgtggctacagggtttcatatttgtttgccctttcttgtgctgcccggcctcccccctaccccccgctttttttttgagacggaagtctcactctgtcatacaggctggagtgcagtggtgtgatcttggctcactgcagcctcccctccccccaggttgaaaggattctcctgcctcaacccccccgagtagctgggattacaggtgtgtgccaccatgcctggctaatttgtatatatttttttagtagagacggggtttcaccatgttagccaggctggtttcaaactcctgacctcagacaatctacccacctcggccccccaaagtgctgggattacaagagttagccaccactcccggctcttgtgctgctttttgtttgtttggtttggtttggtttgagatggagtctcactctgttgcccaggctggggtgcagtggcatgatctcggctcactgcaacctttgccgcctgggttcaagtgattctcctgcctcagcctcttgagtagccggcattacaggcgactgccaccacgcctggctgatttttgtatttttagtagagatgagggtttcaccatcttggccaggctggtcttgagctcctgaccttgtgatccacccgcctcagcctcccaaagtgctgggactacaggtgtgagccacaacatccagctgacaactttttttttttttttggagacagagtcttgctctgtcacccaggctggagtgcagtggcgcgatctcggctcactgcaagctctgcctcccaggttcacaccattctcctgcctccggctcccgagtagctgggactacagggacccaccaccacgcccggctaattttttgtatttttggtagagactggatttcaccatgttagccaggatggtctcaatctcctgacctcatgatctgctcgccttggcctcccaaagtgctgggattacaggcgtgagccaccatgcctggcccgacaacttcttaaagaggatcattattcaagatagtcactaggacagaaaaatgatatgtcttttaatttacccacccccccccccgtcttataggatgattgaaatttttagttcatataattaattagcatactgtgatacatcgattgattttgataaaataagtataatcaatttgatattaatgatttttgtatgtgtaggaatttgccttataatcagatatgtatgtcttgttgtgtacctattggtggcacaaagacttgctctataccttgccacgtgagcttcactgacaagatttttacaactctaaatggtataatttgcagtatactcccatgactataattcgaaagccaaactctactggaagtttgagtttgaaacaatagtaaatagagtttccaactataaataaatctccaacaaaatgcagttgttttgttttccagtgaaatcagactttagctttatggattagtttgtttagataatcctttaggcatataccatatagtcaaacaaataaatgcattttcttttagaagctaagttgttgtgtatgtatttgtgttcatttagaataatgattctcagtagagaggaagggacatatcagagtcttggaggggagagttccctggcagaagattttgaaaaagatacccaggtatggccaggcgcggtggctcacccctgtaatcccagcactttgggaggccgaggcgggcaaatcacaaggtcaggagtttgagactagcctgcccaatatggtgaaacactgtctctactaaaaatacaaaaaaattagccgggcgtggtggcacatacttataatcccagctactcaggaggctgaggcaggagaattgcttgaacccgggaggcagaggttgcagtgagccgagatcgtgccactgcactccagcctgggtgacagagtgagactccatctcaaaaaataaattaaaaaaaataaaaaataaaaaaattagccaagcatggtggcacacaactgtcatcccagctacacaagagggtgaggcaggagaatccctgtaacttggaaggtggaggttgcagtgagctgggccactgcactgcagcctgagcgacagagctagactctgcctcgaaaaagaaaaagataaccaggtatatagtctacttgtgtgcccatgttattcctttctcttcccatagcgtgcatacacataaactcttaagtaataatttatgtgctttttatttttatgtgtttgaatattttattaactaaagggaaagaccatgaatgaggtctagtagtctctgaaaaatgatcctatactaagaaaaatgagctatttatattctaaacaatgttgatggtgttttgttttgctttttttgagacagggtttcgctctgtcacccatgctggagtgcagtggcacaatactgctcactgcagcctttacctcccaggctgaagcagttttcctacctcaccctcccaagtagttgggaccacagacgcataccaccatgcccagctaattttataatttattttttgtagaaacagtgttgccatattctccaaactggtctcaaactcctgggctcaagcaatcctccggccttggcgtcccaaaatgctgggattacagatggatgtgagccaccattcctggccacagaatgctaatactagtatattttttaccaaaagagtatcaaggccagagtggtgggtggcacatgcttataacagcactttgggaggctgaggtgggaggatcgcttgagcccaggagttcaagaccagcctgggcaacatgttgagaccctgtgtctagcaaaaaaaaaaaaaaaaatcattagccaggcatggtgggacacacctgtggtcctagctactcagtagtcttaggtgggaagatcactggaacctgggaggtccatgctgcagggagctgaattcgtgccagtgcattccagcctgggtcacagagtgaaattcgatctaaaaaaaaaaaaaaaaaaaaaaaaattctagtttgctccattgagtatattgccagttttttcacattgctcaatataaatgcattcttattgagatagtttatgagctggtatgtaaaacaatgtggaaaatcattaattttgatttgttcagtggttattaatgctgaaaattaaataccattcataaagtatgtctctattctcccatggttttgtttattttccatttaatttccagttttcttatgctgagtccttccataattttgccaaaaacttagcatcaaggatgtcaaaaaccaagaagcgagatgtttaactgtatttttgtcctagttcactcgtgatttttacctgaaagtactatcttctgtctcttcttgggaaggttttaaagaaggatgtgttttactttattaaccaatcattgtgtacttcgaagttaggaaccatcagaaacgtagctgtgcagagacaaaagatacacatgttttctggtgtacatatctctctttcctttccgattgagtgggtaactcaagaaagatctaaaggccgggtgcagtggctcacacgtgtaatcccagtactttgggaggctgaggcgggtggatcacagggtcaggagatcgagaccatactggctaacatggtgaaatctcgtctctactaaaaatacaaaaaattagctgggcatgctggcagatgcctgtaatcccagctactcaggaggctgaggcaggaaaaatcactggaacccaggaggtggaggttgcagtgagccgagatcgcgccactgcactccagcctgggcgacagagcaagactctgtctcaaaaaaaaagaaagatgtaaataccacttgccttctagagggcattgccctgcctgagcattagagaaaaaacacaattaagaacttttatttgtttattttaatttttatgtatgtatttatttatttatttattttgagacggagttttgctcttgttgcccaggctggagtgcaatggtgcgatctcggctcactgcactgcaacctccgcctcccaggttcaagtgattctcctgcctcagcctcccgagtagctgggattgcaagcctgcaccaccatgcctggctaattttgtatttttagtagagatagggtttctctatgttggtcaagctggtcttgcgctcccaacctcaggtgatctgcccacctctgcctcccaaagtgctgggattacaggcgtgagccaccgcgcccagccaagaacttttatttaaaatttactgatgcaaaatgataatattcacgtaggtaatttttatggggttttcgttgtgttgtttttgtttttctgagactgggtttcactctgtcacgcaggctggagtgcagtggcacaatcttggctcactgcaacctctgcctcccaggttcaagcaacgctcctgcctcagcctcccaagtagctgagactccagacacgtgccaccacacctggctaattttttttttttttttttgagactgagtttcgctcttcttgcccaggctggagtgcagtgatgccatctcagcttactgcaacctccacctcctgggttcaagcgattctctgcctcaccctcccaagtagctgacattacaggtgtgcaccaccatgtctggctaattttgtatttttggtagaggccgggtttctccatgttggtcacgctggtctcgaactcccaacctcaggtgatctgcctgcctcagcctcccaaagtgctgagattataggtgtaagccattgcacccgacccctgttttttttgttgttgttgttgttggtttttttgttttgttttgtttttgagacggagtttcaccaaagagtgcagtggtgtgatcttgactcactgcaacccctgcctcctgggctcaagcaattctcctgcctcagcctgctgagtagctgggagtacaggcccatgccactgtacccagctaatttttttttttttttgagacagagtctcgctctgtcacccaggctgcagtgcagtggcgagatctcagctcactgcaagctccgcctcccaggttcacaccattctcctgcctcagcctcccaagtagctgggactacgggcacccgccaccatgcccggctaattttttttgtatttttagtagagacagggtttcaccgtgttagccaggatggtctcgatctcctgacctcatgatctgcccgcctcagcctccaaaagtactggaattacaggtgtcagccaccacgcccagcctaattttgtattttagtagagacagtttcgccatgttggccaggctagtctcaaactcctgacctcaggtgatctgcccacctcggcctcccagagtgctgggattacaggcgtgagccaccgtgccaggcctatttttacctgagttgttttttatgttgccaggagctaaatgaaaaccagagtacccccaaaaaagaaaaacaggagtggctttcaaagcagaaggagaatatacagcatttccaagcagaagaagaagctaaccttcttcgacgtcaaagacaatacctagagctggaatgccgtcgcttcaagagaagaatgttacttgggcgtcataacttagagcaggaccttgtcagggaggtaagtttgagtgatgagaaattttaaatcctttatcaaaagaatctttcctgaaaatattccaattccattctagtctcagggactttgcacttatacttgcctctgtctgaatcattcttccccagatattcacatggattgtttgctccctgtatatctttactcagatgtcatttcctcaaaatctctttcttaaccaccaaaattttttttttcaagacagtctctccatgtcgccaagtatggagtgcagtggctccatcttggctcagtgcaacctccacctcctgggtgcaagtgattttcgtgcctcagcctcccaaatagctaggattacaggtgtgcaccaccacacccaactaatttttgtatttttagtagacatgggctttcgccatgttggccaggctgttcttgaactcctggcctcatgcggtctgcccgtctcagcctcccaaagtgctaggattacaagcatgagctaccatgcctggactgcaccaccacattcttctgctttctttaaatattattctttgcagccaggtatggtaactgtaatccgaacactttgggaggccaaggcaggcagatcacttgatcctaggagtttgagaccagacagggcaacatgacaaatccctgtctctacaaaaaatatatgtatacaaaaaaattagctgggtgttgtggtgtgcacctgtagtgccagctacctgggaggctgaagcatgaatattgcctgagcccaggaggttgaggttgcagtgagccatgatcatgccactgcactccagcctgagctacagagcaagaccctgtctcaaacagacagacaactaactaaatacatatggtcttctttgcactctctttctcacatgaacatgtgtgtgttcacaaaaccatgtgtttctgtagggtagggaggttgttcctgactccctcactacaatggaagttttatgaaatcacggaattgatgcaattttttatatctccagtttctgactcacagtaggcattcaataaatattaaccaatccacaaatgaaaaatttaaaatgttgatttttattttttatttttactttatctatttatttatttatttatttatttattttgaaacagagtctcgctctttcacccaggctgaagtacagtggcaatctcggctcattgcaacctccgcctcccaggttcaagcaattctcctgcctcagcctctcaagtaactgggactacaggcgtgcatcaccacacccagctaatttttgtatttttagtagagacggggttttgccatgttggcctggctagtctccaattcccaacctcaggtgatccacccacctcggcctcccaaagtgctgggattacaggtgtgagccacagtggccagccttgatttttacatatgaggaaattcactgggcagtttttgcctctgacctgaaatgggttccatgaagtgtgtgctgcccttaaatacatttttatcatcatgtaattattaattgggtaaatgttgtagaaactcttctgccaatgaaaacagttattcttggctgggtgtgatggttcatggctgtgatcctagcactttgggaggccaaggcaggtggatcacttgaggtcaggagtttgagaccagcctggccaacatagtgaaaccccatctctacttttagtagagatacaaacaaatgagccggacgaggtggcgggcgcctataattccagctactcaggaggctgaggcatgagaatcaactgaacccaagaggcggaggttgcagtgagctgagatcgcgctgctgcactccggtctgggcgacagagcaagtctgcatctcagaaaaaaaaagaaaagaaaagaaaaaaattattctcattattaggatacctgtgagtatagataaatttatttctgagagtgggttgaaataagcttgtaatatagcataattgtgcgagtttactaataaattcaaattaaaacagttgcatccattatgtaagaaaaatgtaaaagatacaatcaatcctagtaatagcatgtgttaacagacactattagtaagaatataaattgatattgcccctttggagcaggatttaacagtagcttttaaaatttaatacgcacatagcatttatccatcaaatccacttctagaactctgtcctacagaaatagtaacatgattctgtgatacagtatacatagatatttattgaaacttttttcataaaagtgaaacatgggctggagcagtggctctcacctgtaatccttgaggtcaagagttcgaggacagcctggtcaacgtggtaaaactctatctccactaaaaatattttaaaaatgagctgggtgtggtggtgcatgcctgtaatcccagctactcaagaggctgaggcacaagaattgcttgaacctgggaggcggaggttgcagtgagctgaaatcacaccaccgcactccagcctgggcgacagagtgagactctgtctgaagaaaaaaaaaaaaaaaagtgaaacatggaaacagcttaaatgtccaaccacagaggaatgattgaaagaattaaggcgtcacaaagcagtaggttacaatgaaactttaaaaatttctatgtactggctgggtgcagtggctcacacctataattccaacactttgggaggttgaggtgggaggatcacttgaggccaggagtttgagactgtcctgggcaacatcgcaagaccctgtctctacaaattttttttttttgagactctattgcccaggctggaatgcagtggtgtgatctcggctcactgcaacctttgcctcctgggttcaagccattcccctgcctcagactcccaagtacctgggactacagacatgcaccaccatggcctggttaatctttgtatttttaatagagactgggtttcaccatgttgaccaggttggtctcgaactcctgacctcagatgatccgcctgtctcggcctcccagagtgctgggattacaggcgtgagccaccgtgcccagccaaaaaatttttttttaattggctgagcaggccgggtagtagtggctcacgcctgtaatcccagcactttgggaggctgaggtgggcagatcacgaggtcaggagatcgagaccatcctggccaacatggtgaaaacccatctatactaaagatacaaaaattagccaggcgtggtggcacatgcctgtagtcccagctactcgggaggctgaggcaggaagaatcacttgaactcagaaggcagaggttgcagtgagccaagttggtaccattgcactccaagcctggtcgacagagtgacactcagtctcaaaaaaaaaaaaatcttttatgtactgatctgatccggatacgtgtatattatattattaaatgaagaaagccagttatgtgcctaaaacatatattgttgttcagtttttaaaactgtatgtttttgtaaaatagactaatctgaataaacttggggaaggttgagaagcacatgcaccaaactgttggcctctggggagagagtctgcaaaggcaaaaggagcaagtttgacttttacattatatatgtatgtgtttacttgtttccaatatgaaacaaaattttagaatctctttaaaaaaatgtttagagccctgtgaggtctaaaataaaggaatgacatttgttgagtaccatgtgctaggtattattctgagaactttttgtttattaactgatttcatcttcacattaaatctgtgaaatagctatattattatatgcatttgagaaatgatgaaactaaagcacatttagtttaactaagtgaaggtctcactgctcacaagtagcagagccagaatttagaatacaggcagtatagctctctagtgtccatgttttttttcttttgagagggagtctcgctctgtcgcccaggctggagtgcagcggcttgatctcagctccctgcaagctccgcctcctgagttcatgccattctcctgcctcagcctcccgcgtagctgggactacgggcgcccgccacaacgcctggctaattttttgtgtttttagtagagacgggatttcaccctgttagccaggatggtctcgatctcctgacctcgtgatccacccgcctcggcctcccaaagtgctgggattacaggcatgagccaccgcgcccagctgtgtccgtgttcttaatcactacactaaccagagtagactgcgtgtaaaataattgaatagaatactctgaagaaattgaaaggataacttaggagccctcttcaaatataaaattaggaagtatacaaaagaagaatgttaaacctcttgatatagatttagtcttaagctaatggtaataaaataatatgaataaatagtaaatgaatataaggaaatttgtgctactaattgcccatttaaagaggtaaaagtcacaaccctcttatttactatgcaactataattgaataacagggttaattacatctgtttactggttattctgttaattaggacttttttctggcattatacagcagtaagttatacctttgtcttttgtgttatggattaggagttaaacaaaagacagactcagaaggacttagagcatgccatgctactccgacagcatgaatctatgcaagaactggagttccgccacctcaacacaattcagaagatgcgctgtgagttgatcagattacagcatcaaactgagctcactaaccagctggaatataataagcgaagagaacgagaactaagacgaaagcatgtcatggaagttcgacaacagcctaagagtttgaaggtatggttagcctaagctttttgataacagggaggagaatgaaaaggtatccatgtaagcaggaaaagtcttaagatgatgtctagtcataaagaaattgactaagcttcttttcatttttagcatctttggttgactttaatgttaaatgcctgttgctacagtcttttgcttatgtatttctcatcagagtacaaaaaagtggccaaaacttttaaccatgggaagtgccagtagataagaatcaagattcttgttttaaacttatccaagggcagggtgcagtggctcacgcctgtaatcccagcagtttaggaggccaaggcgggtggatcacctgaggtcaggagttcaagaccagcttggacaacatggtgaaaccctgtctctactaaaaatacaaaaattagttgggtgtggcggcacatgcctatagtcccagctactcggggggctgaagcaggagaatcccttgaacccaggaggcagaggttgcagtgagtcaagaacacaccacagcactccagcccgggtgacagagcaagaccctgtctcaaaaaaaaaaaaaaaaaaaatgtactcaaatgtccaaggccaatattatattctacatgtcaacaagcttaccatttggcttctctctgttgttccaagtaaaattttaaaaccctaatttgctgtaaatatgacttgtacaagatttaaaaatatgaaagtgcattataaagtaaaaagtttaaagctgcacagctactagttagaaaaaaaaaaaacaagaaaaagttttcttctctgtgcttgttcctccagccacctggtccatctccctccatcaaagtcaactgcagttaacaattctgaagtttttgtttgtttgtttgtttttgagacagagtctcgctctttcgcccaggctggagtgcagcggcatgatcttggctcattgcaagctctgcctcctgggttcatgccattctcctgcctcagcctccctagtagctgggactacaggtgcctgccaccacgcccggctaattttttgtatttttagtagagacggggttcaccgtgttagccaggatggtctcaatctcctgacctcgtgatccacccgcctcggcctcccaaagtgctgggattacaggcatgaaccaccgcacctggcccacatgaatcttaatatacaaaaccacccactatctgtcatcgatgataagcacctcaattgctctgtacatatctgtacatttaaaacttttatttatattcagtaaggtccagtttccacagtatttcctatttaaagcttctcctgtactcctacccagccctttttataagctatttgatatttaaactataaaatggttcttggttttactctgaataactatgctggagtacaatgaaattcattcacagaggtaatctgtgtcaaaatctagaagctataacacactcaatggtattcccaatgcccacccaactccattcaaacaagctgttctgaacaaaatacagaaacaatgttaagatgctttattgttttcatgtgaatgtgagtaaaatttcaccttgctatatcttcaaaataggtaattattattacacagtagttatgttgactactaacataatcttccttagttaatgcttagaaaaattagaattataatgattttttagatttgtttttgcagtggggagatacataatcatttagctacagaatagacaatctcccatgaacagatttttaaaccaacgtgtcagcaaagtcaattatgattttaaagccaacagcaccgaggaataaaccaaactgaaagtcataccgtaaatctgatatgactgcatttctctagggcttgggtgatggataggtgtttgacatttaaccatttctttctgtcattagaacctttccgttttaaagcttataaacagtagtccgattctctcagatagtacgttaaaagtgaggagaaaataaagcttcgttatcatagtcaggctttaaataaaatgcatttctgattacaagtgagctcaaggtttcctgttaggaaagaaaaatcaccattttcctcatatttaggtgtatctatttacttagtcaacttgaacattttaacaccaagtcatcacatttctatttacttaagtaatcgttgcctctttcaattttctcctttagtagcggaggcagaatttagaatatagcatcaactgtgtttgatggaggagaggagactgcagttggaacattttatttatgttgattaggatttgtgggggtggggtgctgtttctatggaaagggttgggtgaaaatctgctgcctactccgctgtttcttcagctgccatccagatgatgctttgtcagcactaaatgagtagaaataaatgtaacttgccttcatctcgctttcacttgagtcacacattgagggatatagtttattcttagtataagcattaattttactcttgttaaagaaaaatttttcaaagagttattttttctcattaggcaggaatgtggaatgattacagtattcctggcacaatgtttgttttttttgttttgttttgttttgttttgtttgaggtggagtttcgctcttattgcccaggctggaatgcaatggcacgatctcagctcaccacaacctccgcctcccgggttcaagcaatgctcccgcctcagcctcccaagtagctgggattacaggtgcacaccaccacgcccggctaatttttgtatttttagtagagatggggtttcaccatgttggtcaggctggtctcaaactcctgacctcgtgatccgcccgcctcggcctcccaaagtgctgggattacaggcatgagccaccatgcccgaccttgttttctttctgaaacagagtttcgctcttgtcgcctaggctggagtgcagtggcatgatcttctcactgcaacctctgcctcccaggatcaagcgattctcatgcctcagcctcccaagtacctgggattacaggcgcccaccatcacgccctcgtgtttttagtagagaagggtttcaccatgttggccctgctggtcttgaactcctgacctcaggtgatccacccacctcagcttcccaaactgctaggattacaggcgtgagccaccgcgcccagcccagcacaatgctttaaaaataaaaacttttcgctggggcagtcactcacacctgtaatcccagcactttggaaggccgaggcaggggatcatgaggtcaagagaccatcctggccaacatggtgaaacctcgtctctactaaaaatacaaaaattacccaggcatggtggcacgtgcctgtagtcccagctacttgggaggttgaggcaggagattgacttgaacccaggaggcggaggttgcagtgagccaaggtcgtgccactgcactctagcctggcgacagagcgagactccgtctcaaaaattaaaaataatgtccgggcgtggtggctcatacctgtaatcccagtactttgggaggctgaggtcgggagttcgagaccagcctgaccaacatggaaaaaccccatctctactaaaaatacaaaattagccgggtgtggtggcacatgcttgctctcctagctacttgggaggctgaggcaggagaatcacttgaacccggaaggcggaggaaggtggaggttacggtgagccaagatcgcgccattccactccagcctgggcaacaagggcaaaactccatctcaacaaataaataaataaaaataaagccttttaaaagaatggatgctattttactgaggcagaagatactatctaaatttcattgtttcatttctgtctagaagcacttggaacaactttgttaaccatgaatggtttttttgtttgtttttgtttgttttcactgtgtcacccaggctggagggcagtggcgcaatctcggctcactgcaacctctgcctgccagcttcaagtgattctcctgcctcagcctcctgagtagctgtgattacaggcatgcaccaccacctggctgatttttgtatatttagtagagaagggatttcaccatattgaccaggctggtcttgaatgcctaacctcaagtgatccacccacctcagcctctcagagtcttgggattacaggcgtgagccaccacacccagcctaagaatggtattttaaaatggtgctactcagcctgagcaacatagtgagaccctgtctctagaaaaaattaccagcctgggcagcatagggagatctcatctcttaaaaaaaaaaaaaaaaaaaaaaaaaaaagccaggcacagtggctcacggctgcaatcccagcactttgggaggttgacgtgggcagatcacaaggtcaggagattgagaccatctggctaacagggtgaaaccccatctctactaaaaattaaaaaattagctgggtgtggtggcatgcacctgtagtcccagctacgcaggaggctgaggcaagagaatcgcttgaaccacggagtcggaggttgcagtgagctgaggtagcgccactgcactccagcctggtgacagagcaagactctttctcagggaaaaaaaaagaggctgggcatgatgacatgcctgtggtggtcccagctactcaggtggctgagaggcaagaggatcacttgaaccccaggaggttgaggctgtggtgagccatgatcatgccactgcactccagcctgggtgacagtgagaccctgtctcaaaaaaagaaaagaaaaagattcaaaagccaggcgtggtggtagctcacacctgtaatcccagctacttgggaggctgaggtaggaggattgcttgagcctgggaggtcagggatgcagtgagccatgatcatggcactgtactccagagcctggacaacagagtgagactgtctcaaaaataaaaacagtgctactaaccatagctaaactaagagtttctcttactagctagacatttcttgacccctcacaaaataaagacatattactagggtctagtgcctcagatggtgaaaaatacagaaaggcatatttaatgttgtagtattgaggggagtactttctcttagacaagtgtgtaaatttggttacatatccatttgttgcatgatgaatcaaccagccaatacctggcagtatttatattaagataaaataatttcaacaataggttctgcctcagtgcagtaaatgaatgtgttctcacttgtaggatcaactggtacaccttacagaaacagatctcatcttattgaagctttttaaaacctgagttcatagaatacccaacctactgattaaccaaacactaaagccaaagatcttctgtctctaaacttaaatattttcatctcagaaatgtttatatactgtagttcatgtctgttaccccacgaagaggattgtctcctccgttaccacagaagttttgtttaacctttgaaagattagttttgttattttgtttgtttgttttgtgtgtgtgtgtgtgtttttgagacagagtctcactctgttgcccaggctggagtgcagtggtgcaatcttagctcactgcagcctccacctcccgggttcaagcaattcttgtgcctcagcctcttgagtagctgggattacaggcacatgccaccacaccgggctaatttttgtatttttagtagagacagagtttcaccgtgttggccaggctggtctcaaactcgacctcaaatgatctggccacctcagcctcccaaagtgctgggattgcaggcgtgagccaccacgcctggccaagatttgttaacttgactgacttttaagtttttgcttgtgttaaagagtaaaccattgcgaagtatatctctacctagtttattctcttaaggaaaagaccattgtaataacaatattagtaattcctaatagagatttccaagtcagcctcacatttggtacataaactgtatagttagagttgagagtgtcatgaaaagaaattgggggcaaggcacagtggcttatgcctgtaatcccagcactttgggaggccaaggtgggcggtttgcctgaggtcaggagttcaagacaagcctggctgacatggtgaaaccctgtctctactaaaaatacaaaaattggctgggcttggtggtgcaagcctgtaatccccactactcaggaggctgaggcaggaaaatcgattgaacccaggagatggaggctgcagtgagctgagatcacaccactgcactccagcctgagcaacagaatgagactccgtctcaaaaaaaaaaaaaaaaaaaaaaaaagaaattgcagcaaagtgtttctaaaacgaacagaataaatgtgctttattttctgtctctagatctgataagatattgtctcaccaataaagtgcttttatatcttttttttttttttttttaagagaccagtgtctcactctattgttcagcctagagtccaatgatgcaatcatggttcaccgcagccttgaactcctgggctcaagtgatccttctgcctcagcctccctagcagctaggactacaggtgaacatcattatgcctggctaattttaaaaattgctttgtagaaatggggtctcactatgttggctcaggctagtctggaactcctggcctataaacaatcctgccttggcctcccaaagtactgggattacaggcatgagccacaataactctattatgcttaattcatgagaaaaaatttaattttctaagccaggtacagtggctcatgcctataattactgtacttttaggggctgaggtgggaggatcgcttgaggccaggagtttggaaccagcctgggcaacatagggaaactccatcactaacaacaacaacaaaaatatccaggagctgggtatggtggctgacaccagtaaacccagcacttcaggaggccaaggcaggtggattgcttgagcccaggaatttgacaccagcctaggtaacacagtgaaaccttgtctctacaaaaaatacaaaaattggccaggtgcagtggttcacgcctgtaatcccagcacttaggaggccaaggcaggcagatcacttgaagtgaagagtgcgagaccatcctggccaacatggtgaaaccccgtctctactaaaaatacaaaaattagctgggcatggtggcacatgcctgtaatcccagctattcgggaggctgagacaggagaatcggttgaactcagggaggcggcggttgcagtgagccaagattgcgccattggactccagcctgggtgacagagcgagattccaaaaaaaaaaaaaaaattagctgaacatagtggcgcacacttgtggtcccagctactcaggaggctgaggtgggacgattgcttgagcataggaggttgaggctacagtaagcaatggttgcaccactgcactccagcctgggtaacagagtgagactccatctcaaaaaaaaaaagaaaaagaaaaagaaaaaatgtaattctctgtcatgaatatgcatagtaatcaaagctaattttaatatctactcaggtcactaactttattagtgaaacaacagatattgttacaagtcctatcataaatggggctgtttatgccctaatgttttaaatgaggttttttgttgtaaaactgcataaaattcaatcagcagtttggccaaatagccaagtgcaaaaagtacctgcaacctgatgatctgacctgcttggctttcctctcatttttttcctagtagcctttattttcatgtatgtaagcataccatataccaaatgcctttcgttacaacttacataaatgtatttttttttcttcccagtctaaagaactccaaataaaaaagcagtttcaggatacctgcaaaatccaaaccagacagtacaaagcattaagaaatcacctgctggagactacaccaaagagtgagcacaaagctgttctgaaacggctcaaggaggaacagacccggaaattagctatcttggctgagcagtatgatcacagcattaatgaaatgctctccacacaagccgtgagtttgctttttttggggcaaaacaaatttagtgccccttttcttccaccacctgaacgaaatcacagcaattaaagtactagttggaaatgatagctctcctgaagcttgggaaatgtggtggtggttcattttcttcctgttctcaacattgcttgaaaatgtcatgatgcatgtagaattctcattgatacatttagacatgaggttctaaataggctccctgccagcacagatcctaacaccttattgagattagaatagcagctttgggaagcagtgagcaaaaggtatgattataatgggaataaaaatggttgtgtttgagtacaagtacaaatttttttttttttttttgagacggagtctcactctgtcacccaggctggagtccagtggcgcgatctcggctcactgcaagctccgcctcccgggttcacgccattctcctgcctcagcctcccaagtagctgggactacaggcgcctgccactatgcccggctaattttttttttttgtatttttagtagagacggggttttaccgtgttagccaggatggtctcgatctcctgacctcgtgatccgcccgcctcggcctcccaaagtgctgggattacaggcatgagccaccacgcccggctacaaattttttatttatttatttatttttttagatggaattttgccctgtcgcccaggctgcattgcagtagtgcgatctcaactcactgcaacctccacctcccgggttcaaggggattctccgtccttggcctcccgagtagctgagattacaggcgcaaaatattttctatataagagctttgtaaacttttttttaaagggccagataaggctgcgcgccagtggctcacgcctgtaatccaagcactttggaaagcctaggcgggtggatcacctgaggtcaagaattcgagagcagcctgcccaacatggcgaaacctcgtctctactaaaaatacaaaaattagccaggcgtggtggtgggcgcccataatcccagctactctggaggcggaggcgggagaatcacctgaaccccgggggcagaggttgcagtgagccgagattgcgccattgcactccagcctgggcaacaaaacgagactccgtctcagaaaaaaaaaaacagggccagataagactttttaggcaggaggcaaaactaaggctattatgtgggtacttatataactgcttaagatgtaaccctttcttttttttttttttttgagacggagtctcgctctgtcacccaggctggagtgcagtggcacgatcttggctcactgcaagctccgcctcccgggttcacgccattctcctgcctcagcctcccgaatagctgagactacaggcgcatgccaccaagcccagctaattttttgtatttttagtggagacggggtttcaccgtgttagccaggatggtctcaaccttgtgaccttgtgatccgcccgcctcagcctcccaaagtgctgggattacaggcgtgagccaccgcgcccggcaatatgtaaccctttcaaaatgaaaacaccactcttagctcatgggctgtaaaaaataacaacaaaacaggcgcctgctcatactttgcttgtagactatagtttgctggtctttgttctatagttatttccactagagaggaagagattcagagatctaatgagattctaggtttttcttttttgtttgtttgtggtttttttttttttgatcattcttgggtgtttctcgcagagggggatttggcagggtcataggacaatagtggagggaaggtcagcagataaacaagtgaacaaaggtctctggttttcctaggcagaggacccttcggccttcccagtgtttgtgtccctgggtacttgagattagggagtggtgatgactcttaacgagcatgctgccttcaagcatctgtttaacaaagcacatcttgcaccgcccttaatccatttaaccctgagtggacacaacacatgtttcggagagtaccgggttgggggtaaggtcacagatcaacaggatccccaggcaaaagaatttttcttagtacagaacaaaatgaaaagtctcccatgtctacttctttctacacagacacggcaaccatccgatttctcaatcttttccctacctttcccccctttctattccacaaaaccgccattgtcatcatggcccgttctcaatgagctgttgggtacacctcccagacggggtggtggccgggcagaggcgcccctcacctcctagacggggcggctggccgggtggggggctgacccccccacctccctcccggacggggcgggtggccgggcagggggctgacccccccacctccaaccgggcggggggctgacccccacctccctcccggatggggtggctgccgggcggagatgctcctcacttcccagacggggtggctgccgggcggaggggcttctcacttctcagacggggcggttgccgggcagagacgctcctcacctcccagatggggtcgcggccgggcagaggcgctcctcacatcccagatggggtggcggggcagaggcgctccccacatctcagacgatgggcggccgggcagagacgctcctcacttcctagatgggatggcggccgggaagaggcgctcctcacttcctagatgggatggcggccgggcagagatgttcctcactttccacactgggcagccaggcagaggggctcctcacatcccagacgatgggcagccgggcagagacgctcctcacttcccagatggggtggcggccgggcagaggctgcaatctcggcactttgggaggccaaggcaggcggctgggaggtggaggttgtagcgagccgagatcaccccactgcactccagcctgggcaccattgagcactgagtgaacgagactccgtctgcaatcctggcacctcgggaggcggaggctggcggatcacttgcggttaggagctggagaccagcccggccaacacagcgaaaccccgtctccaccaaaaaaatacgaaaaccagtcaggcgtggcggcgcgcgcctgcaatcgcaggcactcggcaggctgaggcaggagaatcaggcaaggaggttgcagtgagccgagatggcagcagtacagtccagcttcggctcggcatcagagggagaccgtggggagagggagggggagggggagaggggattctaggtttttcttaagaaaaatatggttattcaggcatcttccaaatagcttatgatagctttatcttcataccgatattggttattctgcatttctttttcagagatgtttactccaagatacaagagagaaaaattgtctaaactaaaaaagagtagtctgtcttctaacactcctcctcctttccataggtcatgaattgatagctaacattaggatatatcttttttttttctctctctctctctgtctcagctgcgtttggatgaagcacaggaagcagagtgccaggttttgaagatgcagctgcagcaggaactggagctgttgaatgcgtatcagagcaaaatcaagatgcaagctgaggcacaacatgatcgagagcttcgcgagcttgaacagagggtctccctccggagggcactcttagaacaaaaggtataagtaatagaaggaaaaatcattgttttcgaattagcttttgtcagaagcgttttataaatatattttcatgttggcagaggtcacattagatttctttcacaataccacatttcctgaattctagttatggcagcagatttttctttaaaattactgattcactgatgaaccttatcattaatgagctccagaaatcaagggaatataattaagtagtaattgctagagaaaagatatgggtgtgtgaagacagtcagctgaatttgagagtagcagatatggctctattttcctcacttctgtgttcctagcttgctctacctaaggaggttggagaaggacttaactagtgaagaaagagagctgcattaattgcctgagagagccagggacaaaggatcaggaatattaccttactcatacatccttggcctggagctatacagattggtagaggattactgagggacagaaggtaaaattagttccacacaggtgaaaagtcaggctgaaaaaatgttatttctagatgcacatctttacttttttctgaattattcttgtcagatatattggaaaatagaactagaatccccaaatttccatccttcaggatactaaggtgtgtgtgtgtgtgtgtgtgtgtgtgtgtgtgtgtattagggaaagggcgatggacagaagattttgagaggtaaagagaagaaaggcatttgttgcaagaagtggtagattaggctgggcttaggcctcccagcactttgggaagccaaggcgggaagatcgtctgagctcaggagttcgagaccagcctgggcaacacagggagaccctatctctacaaatatttaaaaattagctgagtgtggtggctcactcctgtggtcccagctacttgggaggctgaggtgggaagatggattgagcctagaaggttgaggcttcagtaagccatggctgcaccactgcactctagcctgggcaacaggcaagatcctgtctcaaaataaataaataaataaataaaacagtggtcgattatcaattgtatccaggattcagagatacattccagaactcttgagtcttaaattcccaacagctgatgtagtcttaggtccgtcggttatcgcatttaatacttacctaatgatcttcctaaagttgtcattgtttctggaccataggcctgtagatttttcctctatttcctatagttcctgtgataaaaatagaatgccttattaaagtaaaaaatatcttttaaaccaggtgttgtggctcatgcttgtaatcccagcacttgggaggcggaggcaagcagatcgcttgagctcaggagttcaagaccagcctgggcaacatggcaaaaccctgcctctacaaaaaatacaaaaattggccaagtgtggtgtcagacacctatagtcccagcgactagggaggtttaaggtgagaggatcacttgagcccaggaggttgaggctgcagtgagctgagatcatgccactgcactccagcctgggttacaaagcgagaccctgtctcaaaaaaacaaaaaaaatctttaaaaaaatcacctaaataagatataagatgttactatttctctagcacagctgtctttattactggcttctttgagaggtatttgcatctaaatattatctcaattttatttctcattcaagatgagaaagataaggccaggcacagtggctcacgcctgtaatcccagcactttgggaggccgagggttgggggagcagatcgcctgtggtcaggagttcaagaccagcctggccaacatagtgaaacaccatctctactgaaaatacaaaaattaaccaggcgtggtggcaggcgcctgtaatcccagctactccagaggttgaggcaggagaatcccttgaatctgggaggcagaggttgcagtgagccgagatggcgccactgcactccagcctgggcaacagagcgagactctgtctcaaaaaataagatgagaggccggggcatggtggctcacacctgtaatcccagcactttgggaggccaaggcgggcggatcacgaggtcaggggagatcgaaaccatcctggctaacacggtgaaaccccgtctctactaaaaatacaaaaaattaacccgggcatgatggcgggtgcctatagtcccaactacttgggaggctgaggcaagagaatggcgtgaacctgggaggcggaggttgcagtgatccaagatcacgccactgcactccagcctgggcaacagagcaagactccatctcaaaaaataaataaataaataagatgagaaagatagaaacataaatcttgaaaaatatagcttcttccatgtgcaaatttcctaaatccatgtcattcaaactttttttttttttttttgagacggagtctggctgtgtggcccaggctggagtgcagtggcgtgatctctgctcactgcaagctccacctcccgggtttacgccattctcctgcctcagcctcccgagtacctgggactacaggtgcccaccaccacacctggctaatttttttgtattttcagtagagacagggtttcaccgtgttagccaggatggtctcgatctcctgacctcgtgatccgcctgcctcggcctcccaaaatgctgggattacaggcgtgagccacagcgcccggccatctcattccatcttttatatttgaaatttaatctaaagttctctcttaggattcagtattatcactaaatggaaaactccctataatatttcaagaatggtgttatgagagaaatattggcactattaaagtatggttataattttagctccacctagtggttaacagttaaacagcactaattagcatcttagtcttatttaatatcctaaccaaaaactgcatgttaatacaaagccattacaatgcaggcataaaatcagtactcattggtgaaggtacagtgacacttttatacagtgttaatacatcttggaaagcaatttggagttgggtgtatatatacttgtttgttttttttcaagtgtcaacagagactcactctgttgcccaggctagagtccagtggtacaatctcagctcactgcgttctccatttcccaaggctcaagcggtcctcctacctcagcctcacaactacaggcatgcaccaccatgaccactgattttttttttttttttttggagggggcaaggatagaaatggggtttctccatgttgcccaggctggtctcaaactcctaggctcaagcaatctgtccacctcggcctcccaaagtgctgagattacaggcatgagccactgcgcctggagttgtatatttagccttgtaaatgttaagtgtttaaaactttgaggaaaagaaatccaaattacaggaaaaaaggaaaagaaatccaaattacaggaaaaaaaaactgcataaatatgttaattataacaactttataatagtttaaaacaacctaactatttaaaatagagatacggctgggtgtggcggctcacgcctgtaatcccagcactttgggaggctgaggcaggcagatcacaaggtcaggagttcaagaccagcctggccaacgtggtgaaaccccgtctctactaaaaatacaaaaattagctcggcatggtggtgcgtgcctgtaattccagctacttgggaggctgaggcaagggaatcgcttcaacctgggaggcagaggttgcagtgagctgagatcacgccactgcactccagcctggcgacagagcaagactccatctcaaaaaaaaaaaaaaaaaaaaggtaaacatggccaagccaataaaaaaatcttattcagccatttaaatgatgtctgcaaaaccagtattaatatggaaaaatgtttatggtgtgttgaacaaaattttaaaagacaaatcctacttgaagtaatgttagtagtggctatgttaatgtgataggttgatttttttctctgtttcttttttaaaatatggttttattcatttcataatggaaaaatgcatacaattatttagtatttaaaagagtaaaagaacaataggatggtacatctatagtgcttcaagatgttacttggtttttatggctaatattttgcctttcaagcaaagtatgtgactacaaggcaggctggggtcaattagcaatcactaagaccctgtacctctctacaaaaactttgtaaaatcctaaaagctgtgatttctgcactttatgcttgccggttgtacatacatataagaaggagacatctgaaaataaatagaaatggaactggagtgaatgttagttgattctagatgaaaaatcattctgtttgaagattgttgtaagtctccaagtgaaccaaaaattgttcatttagtttgagacaaaatgagcctcacatgtacatgaagtcttgtttcaatgtttctcatccttcatttacattaaatttttagataacaacacaactataaatgttaaattatatgtgaaatatatatatatgaaaagtagtagcatttccagagtataaatgacctttttttaatcatctcatttaattttctctcaagatttcacttagtattaacatcatggttagtagtgtttttaagtaagaattaaaatttgggggtgggtgcagtggcttacactgtaatcccagcacttcggaaggccgagtggggcggatcacttggtgctcaggagtttgagaccagccttggcaacatgatgaaaccccgtctctacaaaaaaaaaatacaaaaattagttggatatagtggtgtgcgcctgtagtaccagctcctctggaggctgaggtgtggaggattgcttgaacctgagaggtagaggttgcagtgagccaagattgcaccactgcactccagcctgggcaacagaccagaccctgtctcagaaaacaacaaacaaacatatttttgtgtaggaaacaaaaaattgcagaagaggccggatcgcttgagatcaggagtttgagagcagcctaggcaacatggtgaaacctcctctctaccaaaaatacaaaaaattagctgggtgtggtggtgcatgcctgttttttgttttgttttgttttttgtttttttgagatggagtttcactcttgttgcccacgctggagtgcaatggcactatctcggctcacagcaacctccggctcccgggttcaagcaattctcctgcttcagcctcccgagtagctgggattacaggcatgtgccaccatgcccggctaatcatgtatttttactagagatgggatttctccatgttggtcaggctggtctcgaactcccgacctcaggtgatcctcgtacctcagcctcccaaagctcttgggattacaggcgtgagccactgcacccagccaatttttgtatttttagtagaaatacccagttacccaggaggataaggtgggaggatagcctgagcctgggaggtggaggttgcagcgagccacgatcgcgccactgcactccagcctgggtgacagagcaagaccctgtctcgaaaaaaagcaaaaattgcagtagaatgtggcaaaatataataacagatttataaagtatagcagaaatacaaaagtataggagtgatgtactctatagcggagggaaagtggggcaaagaaatctcagggagatggtataaagagtgctttctgaaggaagaataggttaaccagaaacacaaggaatgtgtaaaggcatggagaaatgataaaataagaaatgtttgggagaaattacaaacaggccaggatggactggagtaagaagagtttgaaaattgttattctaaaacatgttattaaagaggcattaggcattttttatgaaggttgaaggaggacttaaacatggaatattcttctcagggaaagataccaaatgtctgtatgtctgtaccatcttctttgagacttatttgctccacttttcctcccctatagagcaaaccgttcaatacttttttctgtttttgtttgtttgtttgtttgtttgtttgttttgagactaagtcccattctattgcccaggctggagtgcagtagccccatcttggctcactgcaaccttcgcctcccaagttcaagtgattctcctgcctcagactcctgagtagctgggattacaggcacctgccaccactcccggctaatttttctttttgtttttgggttgtttgttttttgtttttgtttttatttttgttttgagatggagtttcactctttttgcccaggcttgagtgcaatggtgctatctcttctcaccgcaacctccgcctcctaggttcaagcgattcttctgcttcagtctcccgagtagctgggattacaggcatgtgccaccacgcccggctaattttgtatttttactagagacggggtttctccatgttggtcaggctggtctcgaactcccaacctcaagtgatctgcctgcctcagcctcccaaagtgctgggattacagtcgtgagccactgtgcccggccaatttttgtatttttagtagagacgaggtttcaccatcttggccaggctggtctcaaactcctggcctgaagtgatccacccacctcggcctcccaaaatgttgagattactaggcatgagccaccacgcccggccttgatacattttttatttctgtagtaccttataaatatcttaacccattctattgcaattttttatttgtatttgcttcccatgaaaaaaatttttgttttgtttatttgtttgtttgttttgagatggagtctcagtctgtcgccgaggctggagtgcagtggtgtgatctctgctcactgcagcctctgcctgccaggttcaagtgattctcctgcctcagcctcccaagaagcagggattacagacgtgtgccaccgcgcctggctaatttttgtatttttagtagagatggggtttcaccatgttggccaggctggtctcgaacttctgacctcaagtgatctacccgcctcagcctcccaaagtgctgagattatgggcgtgatccaccgcgcccggcctagataggacttttgactttaatgtaatcataattccactgtgatatctaacagaattcataataatttttaaatgcatgtctaaatttcccctattatctcaaatcctcaatcccagcactttgggaggctgaggcgggaggatcatctgaggtcagcagttcaagatcagccttgccaacatggtgaaaccccatctctactaaaaatacaaaaattagctggatgtggtagcacatgcctgtaatcccagctacatgggaggctgaggctagagaatcgcttgaacccaggatgcggaggttgcagtgagctgagatagtgacattccactccagcccaggcgacagtgcaagactccgtctcaaaaaaaaagaaaaaaaggaacttgattttacacattttaaaaatataaattatgctgattcctaagggacatctctttttatttttttattttattttactttttattttttttgtgagacggagtctcgctctgtcgcccaggctggagtgcagtggcacgatctcggctcactgcaagcttcacctcccgggttcacaccattctcctgcctcagcctcctgagtagctgggactacaggggcccgccaccaccatgcccggctaattttttgtatttttagtagacacagggtttcaccatgttagccaggatggtctcgatctcctgacctcatgatccgcccgcatcagcctcccaaagtgctgggactacaggcgtgagccaccgcgcccggccttgatttttaaatgtatatccatagcatcaaataatagacactagagactacagaaggtgggagggtgggagatgagtgagggttgaaaaattacctattgggtacagtgttccctattcaagttatgggtgcactaaaagcccagacttcaccactacgcaatatgtgcatgtaaaaaaaatctgcagttgtacccccgaatatataaaaactttaaaaattttttaataaattaaagggaaaaagtttaaataaaatttgaaactcatggacaaatatacatccataaaataaccacttcaaagctgaataattattgcttcctttctttatagacttaaaaataataaattggctttcatttttcttccaatctccaacagattgaagaagagatgttggctttgcagaatgagcgcacagaacgaatacgaagcctgttggaacgtcaagccagagagattgaagcttttgactctgaaagcatgagactaggttttagtaatatggtcctttctaatctctcccctgaggcattcagccacagctacccgggagcttctggttggtcacacaaccctactgggggtccaggacctcactggggtcatcccatgggtggcccaccacaagcttggggccatccaatgcaaggtggaccccagccatggggtcacccttcagggccaatgcaaggggtacctcgaggtagcagtatgggagtccgcaatagcccccaggctctgaggcggacagcttctgggggacggacggagcagggcatgagcagaagcacgagtgtcacttcacaaatatccaatgggtcacacatgtcttatacataacttaataattgagagtggcaattccgctggagctgtctgccaaaagaaactgcctacagacatcatcacagcagcctcctcacttgggtactacagtgtggaagctgagtgcatatggtatattttattcatttttgtaaagcgttctgttttgtgtttactaattgggatgtcatagtacttggctgccgggtttgtttgtttttggggaaattttgaaaagtggagttgatattaaaaataaatgtgtatgtgtgtacatatatatacacacacatacacatatattatgcatgtggtgaaaagaattggctagataggggatttttctgaacactgcaaaaatagaacgtagcaaaatggcttcagttatcacttttgggtgtctgtatcctaagaagtttctgaaaagatctaaagcctttttatcccatatcccaaattcttatgagccactcacagcaggcagcatatgttgaaataagttattactggtacacacctgcattgcctcaccagtgtatttatttgttattaaattgatctgacttctcagcctcatttggactaaaaaaagaaagcagaaatccatgaacacattgcttctcggccttttggctaagatcaagtgtagaaatccatgaacactaaaggacttcattgattttttcagagagtagaaaacaacttagtttttcttttttcctgaatgcgtcataggcttgtgagtgatttttgtccattcaattgtgccttctttgtattatgataagatgggggtacttaaggagatcacaagttgtgtgaggattgcattaacaaacctatgagccttcaatggggaagaccagaagggtgagaggggccctgaaagttcatatggtgggtatgtcccgcagcagagtgaggagatgaagcttacgtgtcctgacgttttgttgcttatactgtgatatctcatcctagctaagctctataatgcccaagaccccaaacagtacttttactttgtttgtacaaaaacaaagacatatagccaatacaaatcaaatgccggaggtgtttgatgccatatttgcaaattgccatctattgaaattctcgtcacactacatagacataattgttatctccttttggcttatgtgattttctgtttacaagtagaatagccaattatttaaatgtttagttgccacagtgaaccaggagtcactgagccaatgactttaccagctgctgactaatcttcatcaccactgtagattttgctgcatgtgcaggtcctctatttttaattgctgttttcgttgctgcagtactttacaaacttctagttcgttgagacttagtgaccatttggcatcaagttaacatcacacaataggaaacaccacttccacaagtctcaagcctcagtgctaaagtactactgaaaaggaactaggaagtttggccaattaaaaaaaaaaagtaaaataagttatagtggtcagggaatctcttgacgaaagctaactcttatttttcagggggcacatgttttgttttgttatgttttgttgtacaatgaaggatgaacccaatgctaaaaagtcagttattttcttggttttccatttcttgtatataaattgtgttggaggtgggtaggaagctgtgagtatgacttgaagaaaaatatccttttcagtgacaaatcagagtttcttacaagttattgtcctgctcccttccaagttgtcttgaagaatccttgctgctaactctggatcctgcttttcctatagtcagagggctccaaggtagaactctctaagtccctctcaatggcactctttgcctagaccaaactaatgaccaaacagtaatcaatctatcactgttgaagtcctggttttctcaaccaaattttaagtctttcccaggtatgtcagtcgagttgccatgaatcctcacctgtaggagtttctgggattcattttaaggaaactggaagaaaattaatgttttaatgtaaatgtttttaaaaccaagatcaccatagagttcacacaaaattttaggcagtgtttcaagaagcactcttatgtgttgttctttcagcccatgctccaggtcaccggtttttaggtaaacatgacatgacatgtacttgtaatatcagtgaaaggggcttttagtcgtctcagtatcttttttgcattcaggtattatagcgtttccaacaaattgagaaattacttatttggtgtaaaatgacgagagagctttagaatttaataaaatgtcaaaaatacaatttgatacccttaaaaattattcatagatctggctgctctgtactactggatgggtggaatagggaagcagatcacttttgcatacaaaaactctttcaaacccaaaatattattggtggtacattttaaagtccaattgtggacttaaattagtcaaattgagagttactgagtccattcagatctccagtagggttttgtatctaatgtatttggccaccagttttacatgtaggtcatgactatacctggattttatcattaagttaactttaaagtatatacagtttgcaaaaaatgattcaaattaattggtttgtatatgtttgtgagatctagcttctgaggaatctcatacatagtaggaaccatcatagagtaaagcttgtagcagaaaaattggaagggttttgagatatcctagagaaagagcaagcactttctgaatcagtggggaaatatcaatatttgatcaaattaacactacctccttcccagtgttggtgttcactcactatatgtctttaagaaaattaaaactatggaaaatttgtctagcatatcagaagttgtaaatgctatatctggtatccagaggctggctgtaaaaagttccttggggtcactctatctcacattttttttggttagcattttaaaaatgcaaagccacatactttgaaatatattattccaaattgagctcccttccctttgcacatattttttcctccccttattgaagtcagctctaaccccaaattctagtatccaaaagtatttttatttgtataatgctatctgaaaaatgtgtttatattatattttcagagctgcaattcttattcgccatttcaatacctagagatagagagtcttgtatttgaagccacacacactggtgtaatatgcttagtactctaggtcaaggatttgttggtaaatggaacattttagcatagtcatgatttttggttgcctagacatcaggtaaacattcagtacactaaagaaactatcctggacactccctcctgcttccaccaatttttttctcacccccttttcaaaaattgaaaactctatgagtgtctttttgagaccataaagcagactttagtaactttctatttctgtaagtactaaatgtctggcattttaaacttttgtagaatacattatgttggacactggaataatactatttattttcacctgtgaaaaatgacttcattgtacttgaaacacctcctttgcatttctccatttgtgccattcactagtggaaataaattgtattataccatgatctactggctttttaaaactgtattaaatatgcacatttttggtatagctattatcatttgtatgtatatattgtatatacatatgagtgtctgtatgtgtgtatagatggatggatgtaactcatactgtacatttccatcagggcacttaaaagttctgttatttttgtttggttttgttatttcagtcctcagttaaggcaagaatgcatgtgtttcttaagaatgagtactctgcgttgatgtttatgagaaggtggtcattagatgcagtcttttcctttttaatcccctcttagcacttctgtgagtggagaggacattaagtaaaatttggaatcataagttgcaatgcagtaaaatggtgctggggaaggagccagttagtgtttctgtgagtttgtgttgtgatgcaataagagataagtaatgcagagagaaatgaaccatggaaagtaagaacactgatggtgattcctctgcaaagatgataagaaaaagaaccaataaatcacacaatctttatgtgctttctatatgtatttcttagtagtgataccattgatcctcttactttttttactccattaatactaataattatatactttgctgaggatcaaaacagccaagaaaggaattactgctaaagcatctaagattctcctgaactgtaaaatcaacaggaaatggccactgggagagaaggatttggtattgggtgaggggctttctccctttacctgcctcttcttgcttgctaatagtaagttctttgtgcaccttccaccacttctgagccactactattcaagtagagatttgccccaacacattaactttttccttggagatttatatggtcctgcattttgtcctgtgctcacaatgtgaagtgtcttctgtattcaaatcaaaaaataatatatttaaggtatataagtgtgaatctcctataatgatggaagaagaggttctcttgtcttagatagaaaagagccttctccaagagcaatgtcaaaacttgggctgtcatctttgagctgtttaccaaaatacagaccattattgaagaaaaacaaattatctattttgttttcccccatctaacatgatagtgcccccaaccaggttgtagcattgccttttaaaagagactcactcactcttagtttttaagaactggaaatttcccatcctcagatcccttaaaggatgaagagttggctgtacacttagcggacttgcctcttgtatgcaaggactactgattgaagtctgttttgctgtgtctggttatgttgtctgcacttttatgaaatcactacaataggtctgcattggaaatgactattaatttgtaaagaagtaagttttattaaacactgtctagaaaaagaaagtgaagctgagaactcttcctttattgtgcatttatattttctgctgaattccggtagttccctttaaagtcatgttgactaatgttttcctccttgtttgtattcagatttccaaaatttcactcatacaagggaagagactccatttagcttaacggtagtctttagatcataagaaatatataaattagtatgcaccttatctgcctgttgtgggtttcttaaacttgcacttcctacccacccaaagatagatatcctttaaagaaaataaaggcagagaattaaaactggggagccatttactatgtcaccatcactgttaactgtttcccagcaatctaaactttttgaagtttcagaggtgtattttttttttgtatatatgtctgtgtgattgtattgttttgtttctaaatatacaaggaattctttaaatagagaaaaaggttaatcctcactgaaacaccaggatgcccactggatatactaatctgaacatctgtaggtagtttgtcatgaaaaagtggagagaagatgagacttttgaatgaatgaaaaagggtatcttgatacccagaattccccccaaagtacgggtaattcaacctgcacagttttctttcactcaaagtgttcagcacttgtgagtgaaaaatcatgtaattatctgtaaatatgtagctaacaaattgacctagtttctgtatttttttgtttttgtactaaagtttataggtctgtgccagctagagagaagttgctgtcattaccagttgtggtcctagcatctaaccctgaaaccatcctaggtgacatttttagaattaatacttaaatgttaaacagggggaaatgaagcttaatcatggtcaggtttgagatcttttgcagtgaaataattttatttaatataaatgatcacatgtcctcaatcatgaatgaggtagggagcctctctcccccagtggccatgtttacaaaagtgtgttttgtctataaagtgcaagtgttttaatgtttatgtaaattatgcaggtgataacatggtttggaactgtttattgggctctttaactgaattttcaaatgaaatgaactatgcttattgctggcacattgatcccatttctggaacatttttcctatttccagagttacatatgttcttttgtcattacccaatttaacctccctttctctgatatgccttgtagccaaagtattaaaggctgatgaacatagacaagggaaatgcatttcttagaaatccgtgaaccctcagttgtatgctttcagtactcgtgttaatatgtttctatggcaactctgaggtcagtggtttagaaatgagataccagtgttaatgaaaagtgtgtgctctttgcttttgcatggcttggcttagtatccaaggtatattagggccacttgaaagcatgaagaccagttatatagggaacaggtttctctcagtggcacattttgctttttctgagccccaaatacattgcctgggcatgaacattgttaccgtaaattgcacatggtcatggactgaattatgtgactttaaaggatgtaactgcccaacatttgcagattctgggtggtctatgtgaccatttgtctcgtatccaaaaaccccggggctattggaacccttccaacactttttcctttgtcatagacaagtttatatataacttaccaagatgttggctgtcctggtgtattgccagacagctctcttttggttcccattccaaatgtgctgctgtccttctttgcatttcacaatatcaaagaaaccaccacccttcttcctaacagcattttatgccttttattccacattaaatgggaattgtgcctacttaggagtgcccctccaattaattacatgtgtccaagaataatccaagctagagacacaaggtgggaaaacatttcaaaaaaaaaaagtcctcttaaggccagtaatttatctgaaaaggtattttatcacaccttgacaccttatatatgagcctattaggagctgcaggtggtttcatagggtaaaatccaagaaaagagaaggatgtgtggggtttctattagaagataattttgttctcattttaccttttcttttatgatccttctctgctagaacaggttaattctccaaatttgttttgttttgttttgttattttttagggaactcttttgcaaaagcaatggtcggatgtaaataacatttaaagtatagtgcacataacttccccggactgttccaatctgataatttgtaaatgctttagagtttttttaattaacacttgtgttgctaaattctatttatgtaagtctgctaaagttttttagcccacttaaaacttaagacaaccatttaaaataatggatgggttactatgagcaatttcgctttcagaacccccttgttttagtatatgaaaaagcctaatgcgcattaatgaggttgaagagactatgagaaatatgtatagtgtatattttaaaacagctttgcttgtattgtgaagatttaaaaacaaacttgagatttttaacgtaactattaacacagttttaacataagttatcccactgggtttaagagcatcttgaatgtataatcctttttgtaacccaggttggtttctacttttaccagtcacccaaacatatttatgtttttagttttatgtactcatttccctttgttttcctcaaacagcatgatttttttgcacatgtagaaattttttaaaagaaagaaattagtacatcattttctctggattttcttcacttccctcttcctttctactaactccttccttaaaggccatatcactccatttgcattatttgtgcaaatgccagggttggtttttatttttatttttgctatttacctaaaaaaagaaaatgcttcagtcaattgcttttttatttaaaaaaaaaaagaaaaaaagctgtaaccttatcatttctgagtagaccattgagcgatgaatgcacacctgtagtagcccaggaccagctgtggtggctaaagggaatatgttaattaagcaagaggttcttttctaaaagtggtatctgttatccacaatgtattttagttattcccacaagtcaggggtccagataaaatgagggttatcagctaactgatatgctatcattgaggttcatcaatgaatttgtacatttctagttccctttggtgaagggaaaaatgatgattttgcaagacctagattttggcttggtttcttgcctccttttttggcagccttcatcttctcatctcccaaaccccctgagcccgtagggttttcatagtggacaaagaacttgtggtcttttaaaactgggactgatacttttttgagagagtatcgtgtcgaaagtgtgatgttctaccactttaccaataactaattttaaatacacattgtcctctcgatttttggaccaaacagacgctcacagtggaggcttatcaagggttgcattggggaagaagcctctccctctctgtcagcaccagctggtaaaggtgactgtacagatgtgcattttccttttggtataaatggtccacagcactaactggtaaggcttattgtacagtatattgtcagtattcttctggttcagcataccttatagttcatatataacctgtattaattgtatagattgtgcattaaaagctgttaccaagttgtcagaacataagagcgaaaacaaggtcatatgtaatattttgtttgtaagtatcctttgtatcatagcaaaggaaatgtttaaaaaaatcaactgtaataaagtaattttagtacacagtgtctgtccagtttttttaagcaattttattcccatgaagataaactctattgagtgactattggataattactgaaccttaggcagtgtgctgaatgttggggttacaaaaatgggattaccactcagatggtaagagtgtaccatctgataaaagacataaaccctcgtccgggtgcggtggctcgcacctgtaatcccagcactttgggaggccaagtttggtggatcacctgaggtcaggagttcgagaccaacatggcgaaaccctgtctctactaaaaatgcaaaaattagctgggtgtggtggcgggcgcctgtaatcccagctactcgggaggctgaggcaggagaatcacttgaacccaggaggcagagtttgcagtgagccgagatcgtgtgactgcactccagcctaggtgacagcgagactccgtctcaaaaaaaaaaaaaaaaaatatatatatatatatatataaaaaccctctagtctaattggctcgccttctgtctgcccagagtgaagtggcctattgtgttctgggtgtgagattattctagttgaaattctgactgcttgatgcaagttcttacgttttatttctaccttgtggtctgcataaccacaacgccgatacacggagccataaatgtaagcagttctcttgggtcttgtacaaagcctcaaaaggtggtcttatctgggcttatctccctagatttgaaaaatcacattttagccctatgtgggggcagtaaaccatggaatccagtcctatttaaaacactgtgacttttttttttgtcagaagactaattcagagggagaaatgctcaggggctgggatttatgttttttaatttaaaaagaaaatagggccgggcgtgatggctcaacctgtaatcccagcacttcgggaggctgaggcaggcagatcacctgaggtcaggagttttgagactagcctgaccaacgtggtgaaaccccatctctactaaaaatacatggtgaaaccccgtctctactaaaaatacaaaaaattagccgggcatggtggtgggctcctgcagtcccagctactcgggaggctgaggcaggagaacggcgtgaacccgggaggcagagattgcagcgagccgagatcgtgccactgcactccagcctgggcgacagagcgagactccgtctcaaaattaaaaataaataaataaataaataaataaataacaaaaattagccaggcggtgggtgcctgtaatcccagctactaaggaggcttaggcaggagaattacttgaacctgagaggcgaaggttgcagtgagccaagatcaggccactacactctagcctgggtgacagagtgaggctccatctcaaaaaaaaaaaaagaaaagaaaataacttttgggttttttgtttgtttttttgtttttgaggcagcctctctctgttacccaggctagagtgtagtggcctgatcttggctcacaacaacctccgcctcccaggttcaagtgattctcgtggctcagcctctgaagtagctgggattacaggtgtgtgccaccaagcccagctaatttttgtatttttagtaaagatggggtttctccatcctggccaagctggttgcgaactcctgacctcagatgaaccatctgcctcgccctcccaaagtgctgggattacaggcgtgagccaccacacccagccaagaaaatagttttaagtaccatttttaaaagtataatttaggttgggccgggcgcggtggctcacgcctgtaatcccagctaccccggaggctgaggcaggagaaaggcgtgaacccgggaggcggagcttgcagtgagccgagatcgcgccactgcactccagcctagtttacagagcgggactccgtctcaaaaaaaaaaaaaaaaaaaaaggataaagtataatttaggttacctaccatattgaaaagaagacttaaagtggcagttttttaactcctagaatgtcgacatttgaactattttgagattaacatttctatagtgtttaatttgcttgcctcaaacagctgtgtggcagccaggtgcaatggctcatgcctgcagtcctaccactttgagaggctgaggtggaaggattgcttgagaccaggagtttgagaccagcctgggcaacatagtgagaccctatctatctacaaaaaaataataaaaatattagatgagcatggtgacacatgcctgtagtcccagctacttgggaggctgaggtgggaggattgcttgagcctggaaggttaaggctgcagtaagccatgatcataccactacattccagcctaggtgacagagctagactttgccttgcagagccaggattagatcccagacctcatctccagtattttcaatatacccacctgaatttggactaactcaatggggttaaaaaacaagatttctagggcatagaggctcatgcctatagatccccccctactcaggaggttgaggtgggatgattgcttgagcccaggagtttggtgtccagcctgggcaacataaggagactccgtctctaaaaaaagattctttgttttctcctcacaattgggttcttcaaattacagtgggatgaaagattcgagttatgcttagaatttgaaatctatcctacctgactataaaagaaatttgaacataaaattagtcatgggaggtcgggcacggtgcctcacacctataattctagcactttgggaggccaaggcaggcggatcacttgtggtcgggagtttgagaccagcctggccaacatagagaaaccctatctctacaaaaatacacaaattagctgggtgtggttgcgcatgcccgtagtcccagctacttgggaggctgaggcaggagagttgcttgaacccaagaggcggaggttgcagtgagctgagatcatgccactgcactccagcctgggcaacaaagtgagactctgtctcaaaaaaaaaaaaaattaatcacgattgtcagctagcttcacagcccctatgccatcacctacatcacatttcgccagctgcagaatcagggtcttcctgtatgtgtcctgggcaattaatgactttaccttttgctaccctattttcaggtacttgttcttaacggatacagggagagaaggctgctgagggtgttagctctgtgcaggctgtgcagtgaaatttaaagggtgccatttgtagataacgtgcatggctccccccatgcagttgtgcaccccggcagctctgaagagagataccctgaaacccccacctttttgttaaaatcctttacattttggagtccaaaatggacattgtttagtatcatctcagacagtgattaggaaaaggcaaataatgtatggcataaagagcactaatttgggtctggtcttagccccaccactaaccatgagatcttaaaagtcacatcgtctctgaccatctataagaaatagaaatgcagatggtttttgacaaaaattgatgtgaaaccaattagctgtgacatagtatcagtgtgtgtgtacatatatgggggtggggatggggagagtttgtcctcaactgggcaacccaaacccaacctgtgaggctcaaaggtgctgctcttccaggcccttcccaactttgcagtgcaattaataactggaacttcttagccttataagatgttgatcagagaataaagactgtgatttgaaagcagatgccccttcatcatggaggtctttgagctatggctgaggaattagagtcttggagaatgggatctgtttgctattaagtatctcattatatcctaacagaccttataaattaaggcctatacacattcccagtcttttcatatggaacaactcataaaataactttctcagggtcacttaagtcatagatgaagtagaaactggaacccacatctccaaactattacttcagtatcctatcaacacacaaacactgtttgcccactgaataatatatttgttgtaggcaccatcaatgatcagggaattgtgcgcctgctgggaaattattagcccagaacaggagacctggttattgattaaacagagctgctgctggttagtgttaggccacacgaggctagatctacaaaagtgaggcaacatccagtggctagagaatgtgcactgaggctctgctaaacgccacagtaggcaagcatggcttagtacacagaagacttcagaagacaaacagcacatatttgtttctggagatttaaaaaataataacattccagtgttactgggagactgatttactattcagagacaaataagttggagagaaattttttgttcaaccatactaaatactaaggcaaggtattgcattattacaaggtaagactagagggactagagacttacttttgatgcatgagtgtcttattgtttcaatgaagtatcattttaccttcaaaactttagctccggccgggtgcgatggctcactcctataatcccagcactttgggaggccgaggtgggcggatcatgaggtcaggagatcgagaccacagtgaaaccccgtctctactgaaaatacaaaaaattagccgggcgtggtggcgggcgcctgtagtcccagctactcgggaggctgaggcaggaaaatggcgtgaacttgggaggcggagcttgcagtgagccgagatggtgccactgcactccagcctgggcgacagagcgagattccgtctcaaacaaacaaacaacaataaaaaaaaacctttagctcctctgagcaagtgcgactagagcataatcattggctatcttaaaaatatactctgatgccaggtgtggtagctcacacctataatctcagacttttgggaggccgaggtgaaaagatcccttgaacccaggagttcgagaccagcctgagtaacatagtaacaaaccctatctatacaaaaaatacaaaaattagctaggcatggtggtgcacacctgtagtcccagctacttaggagtctgaggtaggaggatcacctgagctcgggaggtcgaggctgtggtaagccatgatcacaccactgggcaatccagcctgggtgacacagcaagaccctttctctaaacaaaacaaaacactctgggctgggaatggtggtggctcatgcctgtagtaccatcactttatgaggctgaggcgggaggattgcttgagctcaggaggttgaggatgcagtgagccaagattgcaccactgcactctagccaaggtgacagagcaagaccttatctcaaacaaacaaaaaccacagacacacacactcactctggtcactttggcagggttattttcattaaaatttatgttatctctcaactcccaggatcctagtcaggtctgtggttttctgatccttgagcccagaaacccaccttaagttgttacaaacactaagatcattagcattatttattttaattcacagaccttagatgagaagaaactggatatctgatctagttcatcctcatttcttgccacatgttctctccatgatatgtgccaaggggcagtctagcttgaatatcccactgatgatgtgagacttactgtttcctgaggcattcatttaatctctgagtacttggacactccctatgtataacttctcaagccttcctgaatgcactcttatctctgcaaattgtgataatgagtcaaagcaatttctggtgtcatcctttctggcttgactgaagaatcacaaatactccttttattggcattgttaccaagttctaccagagtggccaagtgtatctgcttgtttaagcagggagaggaattcatgctaaaattcatctctaaaggaagataccttggcattcattactaaaggtgactgattgagaaaggaccttgtggtttgggatggaagatgagtacagaggagtttctgactctaggtggttctgaggttatgtataaagccaaggtgacacttccttgttttgagaccttttctctttcctttttttgagacagggtcttgctctgctgcccaggctagagtgcagtggcatgtttacagctcactgcagacttgacttcctaggctcaagtgattctcccacctcagtctctctagtagctgggcctacaggcatgcaccaccatacacagctgatttttgtattttttgtagagacaggttttcaccacgttgcccaggctggtctcaaactcctggactcaagcgatccacccacctcagtctcccaaagtgctaggattacaggtgtgagccaccatgcctggccaaggcctccttccttccttccttccctccctccttccttccatccttccttccttcccttctttctttttctttctttctctttctttccttccttccttcctttctttctttttctttctttctttttctttctttcttctttttttcctttcttctttctttcttctttctttttctttctctttatttcctttctttttttcttttttttgagacggagttttgctcttcttgcccaggctggagtacaatggcgcaatcttggctcaccgaaacctccacctcccgagttcaagtgattctcctgcctcagcctcccaagtagctgggattagaggcatgcaccaccacacctggctaattttgtgtttttagtagagacggggtttctccatggtggtcaggctggtctcgaactcccaacctcaggtgatccacacggctcggcctcccaaagtgttggaattacaggcgtgagccactgcgcccggccaagacctattttctatcagtatccaagtcttaggatatcgtcactcaaaacagagatgatgtcttctcagagaatttagtgctgtatttttcatactgtcatctccagccaagccaccctggaaatctatgtataaatacataaaatactaaattatgagaattaagttatagcttagcacaatcttgatatcagagatcagaacttagaactcacagaaaatttcagaagcagttgtctgctttctgcattctgatccatggctagagacagaggactcaattgccacttctgaattaatgcctccctttagtcattggctttttgtttttgctttattgttttcattatgattttgagacagggtcttgctctgttgcccaggatggagtgcagtggcgcagtctcggtccactgcagcctctgcttcccaggctcatgcgattctctcacctcaatctcccaagtagctgggactacaggcgtgtgccaccacactcagatggaatttcaccatgttggctaggctggtcctgaactcctggactgaaatgatctgcctgcctcggcctcccaaagtgctgggattactgcactttgcagtgagtcactgcacctggctcgtttccttatttgtattcatttttttatcttaccatttgaaggtgttggtaaataacggacaccaaaaaggaggcaagcaagtaatgaggcctgaagattactgaagacccaccacctggaaagtccaactcagtggttcttaggtgttcgggaggggctcactgaagtctcgacctccagggctgaagcagtgctaccgcctcagtctcccgagtggctgggactacagggtgcaccaccatgcctagctaatttaattttttgtagagatggggttttgctatgttggccagactagtctcgatctcttggcctcaagtgatcctcccacctcagtctctcaaagtgctggtattgcaggtgagagccactgtgccccgcctattgtttggttttgttgtttgtttcttgcttcctcaaactcataacttgccattttgttcaagggccacccattcacagaacagtgtgcctggggctcctccagctggcttcacacaattagctatttaccaaagcagaattcacctgtgtgattcttgaatcattaggctaaaggacagggccatccaaatctttcctgcttgaacagaaattacactttctcagcacaaaacaggcatttcagccctagtcttcaagtagtaatgggaaaatcagagaatgttcttgggatatgcagtgggtgcatctggcacaagggccacggaagagaaatactttagggttcgggtcactagagttcagggttcaaaggaattaatggaacgtgaactggggctgattctgccattcttctgactgtaactacaaagtttatacatttctctccctggaaaactttctttcctatcaaaagggaaaggaaaaccaaccactatttctccaaaagctattctcttgaagaaccagaatcttgcattatctggatagtttctagagaaactatgcagattttcacccttagggactctttaagccttagggtttaaaaaccactaggctgcttcccattttgcagggcaactgggactacgggaccctaattaactgaaatcctcactgtaccagatgtggagggcagctggtggtagcggatggccagatggcagtaaatctccctcaccaaggcttacaccaaggctgttgttcaccggcagtagagcagcttaatttcagttcctttttatttatcctgcttagaaacggcaaaagaacgtcagatgaggaatatggaggaggagaaacaagaagtggggagaagggagataatttttcttttcttttttttttttgaaacacagtcttactctgtcgcccaggctggagtgcagtggtgcgatctcagctcactgcaagctccgcctcccgggttcacgccattctcctgcctcagcctcctgagtaactgggattacaggcacccgctaccacgcccggctaattttttgtatttttagtagagatgaggtttcactgtgttagccaggatggtctcgatctcctgacctcgtgatccacccacctcggcctcccaaagtgctgagattataggtgtgtgccaccgctcccagccaggagggagataatttttcacaacaagataatgtcccttagattatcgagtgctgtctacatttcagtgcagattcttggagttatttcaaagtttcttctgatttgatctagaagaacaagatctagaatctggggcaagattatccaaacctgaaatcaaggcctcaggaataccttataccaagtcttggaatgtgggttttcgtataagcagctctcttctttacaacagctttgctgtttttgaggtcagaacaggagccctctttctcaatgacgattaaaataaaacttcagggcaaagtttttgaatcttagcaacacatggaaacatatgtcctgttgccaaaaaaattttaattgcctaatccaaaccagaatatttagatcaacctgtatactatatattatctctgatatactatatctctagtcctcagcattattcttcataaaaccaaatacccacttatttgctgagtggccagatctaagaggaagcttttctgcctttacagggatggccttttgaataattgagcagacgaagcattggaatatgaaatatttgtaaatcactggtcagctctagtcaacctcttggtgcttttgtttcctctggtcccagatgtgtctcctggctctggaaagggagaggccagtagtaggatcagaaaagggagcaaccaaccagaaaacacctaagttatgaggtttgtgcttttcctgacttagagaaagtccatatctcaggagataaacagttctggctgcagctctctggagtaatcccctgaaatggtgccagagggagcatgtagggtagccaagattctgactccttgaaccatggtctagcaaagccctcagatcctgcatgagagcgcttcctatttgtaaaatacccttgggatctctccagtgaggcttgggggccagatcagccccattcctagctgagacttgcagagctcctctgagagattggaacttcgcattccttgagatggacattcacattctctacctgctcagccctcagcgagccagccccactgcctctgccgcccttctcacacacacaagcctgctgccgcagttgccagagcattcggtcaaagcagggcgccacaaccacagagcaaatgagggaagtggggccgagacacaaacatcctgtcctcatgacatcaaatggctccagcttgagaatcggggtcactgcccagtgacatacacaaacgtctcatccctctagccactgccagtaagagggcattttctcctgagtccatggattgaaaaagtgctatcctttggcttgtgatgtcagtgacaggtgacagtgactggaacgcgccgctgctgaccggatgagtagggatatgttgagcagaggccaggcaggagttctgctgaggatgaagtgagtgcaggctcgcaggacgttccttctctttcaaggcaccaatttaagagagagggactgaatgaggagcacagagctggagctccctctgttcagtccgccccatctttccaggactcccccttgcccagctctgtttttctttgcaggacttgggggttctcaggccaggtctttcaccttgtgtatgatcgcttccagttaaagatctcctccaggttggaagaggaagagacttcccgcctctgcaaggctcccccacgacgacggcccccaaggaaggaagctctgtgcctgctcagccctttaatcctctcctccgttcggaagaactcagtcaaggcccggaaggactccaagatgacctcatggctccaggctggcaagggctcctggcgcaggaagccacagtggcctccgtggcgactgagcaggaggaagaagtaggggttgctgtggaagagttcagttgtcagagtgtggtctgggggtccacacacggggtcgtcagcactgcagatacacagcacaggcacggctgcctcatcgacatcccggagcgggtcgttgcggtcccagtaggtatcccagctgatggggaagcttttggtgtggcagaagagagcctcctcaaactctcgaagggaacggctcctgaacagtctgctggtgtccacagtgtcctccagggctgtggcatacctggcagcgaggtgtttagtggggaaggtgggaaagagagggaagaatgagaacatcaggtgacagcagatgagacagacagacagcccgcaggccagatctgtccacagaggctttctttggccatttagggcttcgaaaacgtttaatttcatggccatcatttaaaaccagataaggctggttgtggtggctcacgcctgtaatccaaacactctgggaggccaacgaggtgggtggatcacttaagtccaggagtttgagaacagcctgggcaacagggcgaaaacccatctctaaaaaaaaaaaaaaaaaaaattagcttggcatggtggctcagtcccagctattcaggaggctgaggtgggaggactgcttgagcctgggaggtcaaggctgcagtgagctatgattgcaccattgcattccagcctgggtgacacagagagaccatttcaaaaaataaaataaaataatataaaataataaaagtggccaggcgcggtggctcatgcctgtaatcccagaactttgggaggctgaggcaggtggatcacgaggtcaagagattgagaccatcctggccaacacggtgaaaccccatctctactaaaaatacaaaaataagctgggcgtggtggcggacacctgtagtcccagctacttgggaggctgaggcaggagaatcacttgaacccaggaggcagaggttgcagtgagccgagatcgtgccactgcgttccagcctgctgacagagcgagactccatctcaaaaaataaataaataaataaataaaataataaaattagaagatttcacataaaatgcaggtgtctggcttctctagggaagtgggaagatccagccacatgggtgggcatttctcagcacaacaatgggttcctccctccttcctgtgtgacggtgcccactaggcctgtcattcacagcatcactgcacctgtctatgtgccctaggggcagcatttgacttcacagctgctgacagttctcctaacctcaacttctggccctctgtggagaacttgctatgaactgtaacctactaaactgctcctagaagaacttgctgctcagagtatccaaaccagcaggtgacacctctgctaataattcacatttgactttaggttgcattcattgtttttatttttgctttttaaactaacatcctgtcctggtaatgtcacatgagtgtgatgttgatcaggtatacctggggcagatattcctagagagtgtgctgcctggcagaggaagcaattgagttggtcattaatttactgggtggattcctaaatgggggcctcagagcaactgctttgggtaacagggaacatctttgctgtttctagacccctggagagggcttggcatcctgacaaggaggccaggatgagcagctccgtcttttgaatagctcaatccagcctcagacagttgaaattagatgttaatctctgaccaggcatagtggctcacatctataatcccagcactttgggaggccaaggcgggtggattccctgagtctagacattcaagaccagcctggacaacatggcacaatcccatctttatgaaaaatacaaaaattaaccgggcatggtggcatgtgcctgtagtctcagctactcgggaggctgaggtgggggtctggcccccacatcccaggtctttctgctacaccacactgttgccataatgacttcgacctcattctgccatctcctaagaaagccagagtgcaggctaggaatgtcacctgagcccaggaactcaaggctgcaatgagtggtgattccaccactgcactccagcctgggcgacagagtaagatcttgcctcaaaaaacaaacaaacagctgggcacggtggctcacacctgtaatcctagcactttgaaagctggggcaggcggatcacttgacattaggggttccagaccagcctggcaaacatggagaaaccccgtctctaccaaaaaaaatattaaaaattagctgggtgtggtggtgcacgcctgtagtccccagccacttcagaggctaaggcaggagaatagcttgcacccaggaggtggaggttacagtgagccgagatcatgtcactacacttcagcctgggtgacaaagtgagactgtctaaaaaaaaaaatacttttaaaaaataataattttaataaatgcctacatatatgcgtgtgtgtgtatatatatatataacatttttttttgagacagggtgttgctctgtcacccaggctagagtgcagtggcctgaccagggctctctgcagcctcgaacttctgggcttcggtgatcctcccatctcaacctcctgagtagctgggaccacagatgcatgccaccacacccggctaattaaaaaaagaaatttttgtagagacaggttttcctatgttgcccaagttagtctcaaactcttgggctcaagtgatcctcctgccttggcctcccaaagtgctgggattacaggcgggagccactgcacctggcctcaaatgccaccatatttctgattcctgtcacctccaggctcagagactgtgagtaaacattctgggcagataatcgtttgcaattgcttccagagtgctctttgctgagctgttaagctgtgggctaagtggtaaatgtcaggtatctctgctgtcgtgggccaggtgctcagattgctaggatacagcagggggtgccgagatgaggcaaggggccgggttaggagtccctgctctagcacagcgatactagctgagtccatcgatgacctttaaacccgcttccccggttctgtctagattacagggtttggaaggctttggaagatgtgttcagagaactttgcccaaactggcccacgcctgttccaatgctatgcatagctgtttctgattcttagccagctcaggccctctattctttccatgctggtctgcggcctccgttacccacctgctgagggcgatcttctggtggagcagaaagccccgctcgtagggccagggcaggccggcctcgaaccactctcggcagcgcagcacgggcgagatgcaggcggcgcctgtcacgtagctggaggagccgcactcgcccaggtaggacaggagcagcgccgagcccgagccttcgctcaccgcgaacagcggcgccgccgggtgtcggaagcggatgtatgtgaccgcctccttgaggtcggacgggtccccgaaaggctgcagccgggggctgaccagtgggcaaccgtggtggccgcggcgatggaagatgaccgggtagtagccgcgctccagggcgagcaagcaaaggccgagcacgttgcgggtgaggcgaccccacgcattggggatcaccagaagcaccgcaggaaggcccccggcgctggtgatccggcggccccgaacacaaggtcctaccacccagtccagggccactagcccatcgtccgccaactgcaggtactcccgggccagctcaggcccaggcgctacgggcaggacgaagtggcagagggtctgcaggtggggcccggagaaccaggagcgcgggccggcctccagcgcctctgagcgccgcagggcgcgcagcaggcactgggccagggccgacggcttgcaaacaaggctgcaccctcccggcagtggctcgcgcccgtcgctgaactggtccgccgggcctccgccgtccgcctcctccccgtcgtctcggtcttgggcccccggcagggtcctctctccgacggcgcgcccccagggtccccggagccgcgggccgagcaggccgagaagggcgagcacggccaagatgagcgcgagggcggcgccccacggcggcatggcgaagctggagagccccggcgggcagcgggcggcggggccgtctactcggcgagctccgcgctttgcccgcggctccgcccgccggcggcggctgcccagggccctcccgcgcgggcgcgctctggattggccgtggccgggcagaggcagccagttcgggcccggctgccctcgcccgccccccacccccgccccggccctttgtacagcaattgcaacaagtgggagcagagggtgagaggagccggggccaccagggagggagggcgcgccggcagccggaagggagtggggagggcacgagccggggagagcggtgttggccatggagacgtggggagactggaggccgaggcttggggacccgactgtcatcagggtcttccgccagaccctgggcgctgcgccctcagaggccgatgaaaagaagcagaagggagaggtgagtaagtcgcagctccgggcgccggctcccgggaccccgtggggcggcggccgcgcgcgcgctctgccctcgggcggccctgctctcccccgcccggccccgcaaccccgcaataacttggctgggcggggtccggcactgggctagagaggtcgagcgcggcgtcttgagccgctggcgggaggctgctgcttccccgcctgcatcagtgcgggtcccgtggactcctcgcccccgtccccgcgagctcggggctccacatcaaggaaatcctcagcccgggagtggcttccccagaaacagcagccccaagcctccgagagtcagtcggagaaaaggacacactcaggcgccctgcgacagggatgcccgtccgacctacaaggaacgcctcgtaaaccggggtgcatgggagaccacggaaataacacgttctcgctgtttccaagctttgggataggcatctcgaccctcgctctctacccacgtttcccccccaaatcctggagagggaaccagaaccagcgccccgctgcggggcgggccggccagcgcacctcctgggggtgaggcctgtggcgtccccatctcgcggcgaccaatctctttctagacgcgcgcctgccaccgctgggcgacggcggaggtggggaagacagcagcctctcggctagctccggcctcccggggcttctgggtttggagagtttggggagcggagacacctcccgaggctcctccgcgttggaccctatttgcgagggcgggagcggggtgggccgacggcgaagctccagaggtgggaccctctcccttcagcagctcttcctgacttcatgattctgcccctcttctcattgcaggtcacaccgacaaatctgaagcgggtttgccaggggagtgtacccgtctccccagcctgggccacccggtccacagggattccatttccggccttacactccgctccacgatctcatccaggcgctgcagctgtgcagctgctctacagactgcagggacctgctgagacgaatccccggacgaggaaaggggccccccgcctgccctactgagccttgcgcgctgacccggttcctacacttaacttttccggcttcgggtttaagacgcgtgcgcgcacactccgctgctgtgggcgggcattggggcggggcgataccgggggcccactgtctggggaggggcgcgcgcgagcccagggccaacggacgcgcgggcggcgcgggcggcgcgggggcgctggggctggaggggcggggcgcgcgcgctccctcgctggcggagcggctgggcggcgggccgggcccggggccgcttggaatggcgcctcctccgccttcgccccaactgcttctcctggcagccctcgcgaggctcctgggtcccagcgaggtaaggtgacccgctcctgggaaggcctcggcccgcgagctcaaagcgctttgccaaaagttcgtcctggaaggagtggcgcgccgagggggacgcggagttcttccgctggcgggctgggcctggggagagagagggcagggcctcgccgcgtccagcgccccaactcttcgctttggacccacaggtgatggctggaccggcggaggaggcgggagcccattgtcccgagagcctgtggcctctgcctccgcaggtaggagccctggagggcccagggagagagggatgtgaaaggctagcccagtcccgctctgttctcgccgcaccctccacagtcaccatctgaggacctctgccggttcctcagtcctcagtagccaacttctccatcccagcctggcgcttggggcctgccgtcccctccccaccacacacacacggagtcccccaactgccctaagctctgttctttccccatgtataggtgtcaccaagagtgacctacacacgagtgagcccagggcaggtgagtacaagcaggggcccaccacccttggtgtccacgcctggagacaggcgctcctagcaggcttcgctgcctgttctgctgatcggccccattccttaccacttccctcaggcagaggcagggttctagttctctgccccacctccaagcccaggacagatcagccccaggacagatggctcaaagacagtgagccataggcctgtcatctgcaatgctgtgtcaggatgctgttgggtagctggctctgtggacaagtggctgtgagtggaactctctctgagagtagctggaaaaaacccaggctccagctccctgaggagacagcgggaagtctcctgactttgtgggccccagctttctgtaggagagggtattaattctgtctctacctgtgagcagcgagggagggtatgtgccagcaccgtgtacagtacagagctgcatcgtgcaaggagtgtgcctccagttgccaggctccacactgcgggctcagcttgcgtggtagcatctccatcttcatcgccagctcctctgaattttcctttgaaatacttattattattattatttgaaatggaatctcactctgttgcccaggctggagtgcagtggcactcactgcaacctctgcctccaggttcaagcaattcttatgccacagcctcccgagcagctgggattacaggcgtgtgccacctagcttagctaattttgtatttttagtagagacgaggtttcaccatgttgcccacgctggtcttgagctcctgacctcaagtgatctgcctgcctcagcctcccaagtgctgggattacaggtgtgagccaccatgcctggcctgaaatacctaacttaaattggccaggcatggtggctcacacctgtaatcccagtactttaggaggctgaggcgggtggaacacctgaggtcaggagttcaagaccagcttggccaacatggtgaaaccctgtctctactaaaaatacaaaaattagctgggcgtggtggcacacccctgtaatcccagctacttgggaggctgaggcaggagaattgcttgagcccaggaggcagaggttgcagtgagccgagaccatgccactgcactccagcctggcgacagagcgagactgtctcaaaaaaaaaaaaaaattctctgtaatagctccaggccaagagttgttgcctcacgccacctatcagattcctttcctcaaacagccctttcatgaagtcattcctctgttcacaaactgtcaatggctccttatttcccaccttatcgtggccatattctccggcctggcttttcaggccttacttaagtaagcttcgtctgacctctccacatccttggttcctctccagttgtgtcgggctgtttgccacacaaatgagtgccagcctcgcccttaccacagcccctttgctcctgtttattctcctccacacctggcctatcctgactcggagagtgcagctccctgccctcctgccatactcccccagccatcttcccagtcccagctggcatcagctccccctgagacactgcccgatggcatcagcctttattcctcccctcctcctctgaatctatctctgataatttaacaactaatcactaagttttattagtttgctgttttatttgcattagttgtttccctgagtttctcacacactccttgcaagcagagtccaggagttctttggcatctcccacagcatctagcacagcactgagcaccaagtcaactcaatcaaagaataatgaatgattgatggagtatttccatcctgagattgtgcacctgctgcctgcctgccctgtatttggatgctcttgggagactgtatagattggatcgatggtcttcatttgggggttgcttatggcttggattgtggacctgtagagccatcgttacacctgcagggaaatatggctagagtgtggtctgagtctggcaggattatccaggcatgctgtgagctttgaagggtggcacttgatggagaggaagggtgaaaggaacactcagaggcaagagtgggtacatgccaatacccagggccctttgtcctttcctgggccctgaaggtagaagagccatccagctatcctgggagtacctttaaactggtcccctggatgggagaacttgagattctctgggagggctctgggcctgctttgatgtctctgtgcctttcctccaggctgaggatgtcaccttcctctaccacccctgtgcccatccctggctgaagctccagcttgccctcctggcctatgcttgtatggctaacccttccctcacccctgacttcagcctcacgcaggatcgggtatgtagctgatgaaaggcgcttgcctggccctggcagaaggctatggccccgtgtgcagggaatggaaaattcaagggtttcctcttgtttgtccccaccttcctcgtagctctaacagttacctcctctcgtagcccctggtgctgactgcatgggggctggcgctggagatggcctgggtagagccagcctgggctgcccactggctgatgaggaggcggaggaggaagcagaggaagaagaaggcatggatctactgtgaaagcctttcagggcctgctccctccgagccaactcccggtagagggaggctgtgccgaagagggtgtgtgcaggtgagagacgctgggcccaggcttgttggccctcgggttctctgagaggggcagcagggtgattgctctctctcctctccttaggccctggctctggcctttgctctgcggagctggcggccccctggcacagaggtgacatctcaagggcccaggcagccctcttctagtggtgccaagaggcggaggctgcgggctgcccttggtccccagcccactcgctcagccctgaggtttccctctgcttccccagggagcttgaaggccaagcagtccatggcgggaatccctggtagggagagtaatgccccatctgtgcccactgtctccctgctgccgggggcgcctggaggcaatgccagctccaggacagaggctcaggtgcccaacgggcaaggcagcccagggggctgtgtctgttcaagtcaggcttccccggcccctcgcgcagcagcgcctccacgggcagcccggggccccaccccacgcactgaagaggccgcctgggctgccatggccctgaccttcctgctggtgctgctcaccctggccacgctctgcacacggctgcacagaaacttccgacgcggggagagcatctactgggggcccacagcggacagccaggacacagtggctggtgaggagttccctccctaccctacccgaggcccccgccccacctcgcgtcgcccgccgccccccgtagcttccctgccctcccgcccttgactgctcggcgcccggcccacagctgtgctgaagcggaggctgctgcagccctcgcgccgggtcaagcgctcgcgccggagacccctcctcccgcccacgccggacagcggcccggaaggcgagagctcggagtgacggcctgggacctgccactgtggcgtgcggctcctccccgcgccgcgaggccgcgacctctgccacgtggaccgcgcgcggggcgctccctggtggcgatggcgcggcactggccgagcactgcgggggctttcctccttgttggttgctgagtgggcggccaaggggagaaaaggagccgcttctgcctcccttgccaaaactccgtttctaattaaattatttttagtagactctggagttgagcttgtgcatctgccgcacagagactcccacccggaccctcgtcctaggccatggaggtggtgtttgaggcagcccgcccccgctggccaacctgtccctggacatggggctttaggaatgtgctcgtgggagggtggcgttatcgtcatacatgttagctttgttattcgcaaactaactcttccactagacagacgttcccagcacaggggcttccctagggcgggggtcctggggcacttgcagtcacccttcatgtctgccacctccctccagcccccattctctaagcatcagaaacagctcatggtcacttctttatttttgatacaaatgtacatgacacgtcttgacagcccacccaccaccacacaggtagggcctggcccccagggaagaagcgggatggggagagagctggtgggtcccaccgtctgcctctccagccttcccaggctgcagccaggttcccaggcctccagagggtgggaccacagcaggtgcaggtagtgatggtgggtgctggccttgcagaggttacggggaggggactcagctccacagccaccagctgagtcggggaccccggggagccagccccaggctcaggtgctcagtcctccaccctagccagcacacattccccctccacgcaggagcaggaggagatggagggaagtggtttttgatttaagttcatagagaaggggcgagagtggggagggatcagggaggcagctggcaggaccaaaactggctacccggacagtccctggctccaggtggggaagggaagctgatccccatgctggtcccactgctctggtcccctcacccctcaaaactccagatggaccaggcctccggaacggcactgccgcccacacactcaacacgcaggcacgcgggggcactcagttaccacaaagttaaaattaaggggtggggaagaagaaagaaaaaaaaaaaacagactttccagtgtttgctgctggggaccccagcacacaggttggggcctgtgccctaggcaggggccatatggcattaaagggagagcagcaaggggctggtggctacagggcagggacatccatggagactatgtacaaaggaggggatgcccccgctcagcccccagtagggctgaactggctcatgggggtggggcgcatgtacggagagctgccccacttggagtgtccccacctgcccctttgctgagggtgccctagaaggcgaggggctgggagtgatgccttgcaggcccctgctcactaggaggggggagatgctatatacagaggggaggtgcatggaatgtgggggacagaagctcctgcccccccacctccccatccttaggggctcgacaggggtgggcaccagggcacctggctgccagggagtgtggcagcactaagggcacttgtgccagtggctctgttggggtggggattaatgtctggagtggcccagctcctatggccagtgaggtcctagggtgcaggtgagggtgtggggagagaggtcactgcttcttctctcgggtggtgatggtgaccagctgcttggcagccttggcgatgtcataggcgcactggatcacctgctgagtcagcagctggaagtccactggggcgccgggctctgggggcactgtcttccggcactcactctgcagccggtaggcgctggcgttgagcagccgcagtgagctccgcactggctccagggctggcctctggagggggcaggagtgaggctggaccttggactttaagccaccagctgagatcagggcccagtttgtctgtgtctccacccaggtagcgatcagatgggattctccacgcctgccccagctcgaggccctcccactcctggtcctctctttggcccctgtacctttgggaagagggaggccatctcggtcacagccaaatggatcttctctgagcagggcacgaagctgcggggagaagggaggctataaagcagggggctctcaagggaggttcccagggacagcagaacccagggcccctcatgctctctgcaacaccctagaagccaacaggaactgcatccccctcacctccccctccactcagtacctgtcatgcttgaactcctgggctgcccgcaacagttcctgaatgttcttggtgacctgctctgtcttcaagatgacatcctctgtgctgggaagcccaggatctaggtctccatccaggctttccagctctgggtggaagtcttcctctttgcccagctctagaaacctcttcccttccagcctgaggcccaggtccagaaaacagagacaaagatacatatagagaaagacacgttccagcctcggagccgcccgccttggtcctcacacactgggggccctctcaacctccccgcctcggcatgtgagcaggctggactggagacccagggagcctcaccccagcagtgggtccccactttgcgtgttctcatagtcactgtcggctccactgccgtggcgggaaagcttgctctggagggcggagggaaggggctgtgagcgccgtgttcctggacccacactgcccctagcccacacggcccccagccaccctgtgggcactgggcatggaaacattaccgtgtggcggcttccctcctgggagcaggacagcagcggggaggagggagtgaagggcacagctgaggcagacacccctttccggatctgaaacccagggcagcgctggatggagtcagtgtgccccactgcccccctgctcaccagcagtgcagcagggaccaggtcagtctaatcatcttaagccccgaattcagcacagagcccagaaccccctggggctcagaacctactggctaagatggacacgccttccccaggcttacccggtaaaggccagcagggacgtgcactgaatagatggcgtcgtcctctagctcctggggatgttagcacagcgagcgtcatggtggaccctgcggcagccccacccatctccccacaccttgagacccataggtgactcacagtgctgtggaaaggctgcagccgcgtagtgagctcgtccccaggggggcccccaaagggcttcagggcagagccaggttcatacatggaaaaggcctggcgatccctgcggtgtgtgctcccgcctggcgccatgggtgtgtgttccgcccgttcactggggagtggaggtgtgggcaccggccctggaggctgccggagctgcaggttctccgcctgcagcttgtggatctatgggtgcaaagtgctgtcaaccccctggagtcctggggctccccctcccaccgaggctgcaccctcacctctcgctgcagcctccggagctcgtcgctcaggctactgttgaccttcatgagctgctgcacctttgcctccgatgtagccagggccttcttcagctccaggtactcctgcagcgtcacagccccgtcagacaagtccgaggagtccatgctctgcagagagagacctaagctggtcagcacctgggggcagggaggccaacacccgcagggggcagttattgaggctaggagcagcccacctgtccctcaggcccctgggctacaagaggacagagctgggcctcagcgaaggcctgggtcagggcacaggggagtgggaaggagggtgggactcagacccgggcccggttgctccgagtggcgccggtgctgcgcaggggctcctggtctgtgtcctcgtcagaggccacgctgtcgtagtcgtgttggtcgtcgaggtcactctggctccgcagagacagctcgaggttgtctgaggacacaggagtgtcactcaggccacactccaccacacaacccatctctcaggtcaccactggcagggagagccatgcaggaaagacccctggagccccgcctgcttcccacaccctcccacacaaccctcccacctgtggggctgctcaggctcttgccctgctgtctccgcttggcctcactgagaatgtcgatgatcaaggtggcaaactctcgggcattaaagcgggccagcttttgtcgcccctgcaaggcagaaagggccaggctggcttcaggggaccccttatgactgacgcaggacggcagggaccaagtagcaaggcatggctctgccatttaatttaaccccagctaaagcgtcccagcctagcttcacctggctagtcagcagccaaggccacccgtggcagggtatgatagagtagggtgcctgagcagaggccggaacacccaccggagctgctccccaagtgctcaaaacaacagcctcctgaccttcccaaatcccagtgccagctgtgccctgagggaggccctggcaaatgctggagagctggctcaggccccagcccactgccggatgaggagggaccgcggggatgaagtagaccaccccaggcccccaatccagccccctcacctgattccgcgtggctgagtattccgggttaacaggcaggaagggcacggcactgcgctctgtcaccagagtgctgtggttttgggtagccagccacactgtaggggacggacaggagcagatcagccacggtggccaggcccccaaggtgggggtggggaagcactgagcccagccttcctagctgcccccacgcctactgagcactggtgttcagaacaggggtggtctttgggcacgcagagctaggccgggccagggcaaggctgggcgtggccggctggggacagacaaatggaacaaggccagtgccactcatccaaacccagagtttgggctggaatccggctgtggccaggaaggagtgatgcaggggggtggagcggtaccagggagacagccaaagtgggaggctgccagagcaagaggagccccagtctgaggctgggggaggagcacgctagccgcctccccctcagcactctacccagcctgggatgctgcccaggcaggctcacagccagcaggggctcatctgcaggcctctgagcagccccaaccccaggcaccccttcttagcccagtaaaggaccagagacccatgcctgggccgctcgggtcctccacgccagacactcctgctccctgactcacctgcatcattttctcttcgatccacctcgtcatacacgtccatggcgagttcctcaaaaagccggttgctgagctggaggaagagaggggcccagatgttgtcagatgcatcggctcccagtgccaaggccagctccccagcatgttgtgagccttggggaaccggtggccttccttgtgctgcccagcccctacagtctcagaatgggaaagtggaaagggatcatgttccaaactccaaggtgggagagaagggaccagtccatccccttgtagggaggtcagggagaggggactgctgaggccagtgaggggacaggtcaaagacttggaaaaggtcatcgagtcagaggcagaggaagcaagagcagagggtgggggatcagagaggggccagcttcaagtgtcagggcactgttggagcagacttaccgcctgcagcttcttcttagcagctttggccaattcggataagtcaaggctgagggcagagggagatgggaattgggaggagaggagagacctgagaggtggccaggcccatgccagcaacctccccaacatgcagggatcccggggagatggcaccccagatgctgcacaccaaatgcctccccgccctaccccaccttcaggcctgctgccccggcaggcaccatatacctctgagacatgcacttttgccgagatctaagtccagaggaaggcagcagagggaagaacaggacagaggcggcagttacccaggagcagggcagcacacgccttttcacatcaggcccagacccatctccacgcacacccggcccagaagggacaaagctgaattcatctcaccgcgtcccccacccctcctcctctggcttgctcttcctctcagtgacctgtttgtccaccaccagtgtcagccacctggcagtcacctgaagcctccctcaccctccagtcctagtgaagctccccaggttcctcaatcacctgttgcctgggctttgtaagtttcttaatctccctccttctagttttgtccctacaatcctgttccacccagcagccagggtgattttttggatacacctggctgcactaccccttgccttaaggcactgcagtgataacaggtgcatatggcacactccaaacatacttcatcagaataccctagggacgggcacagtggctcacacctgtaatcctagcactttgggaggccaaggtgggaggttcgcttgaggccaggaggtggagaccagcctgggcaacacagagatacaaaagcaatttaaaaattagctgagcacggtggcatgtgcctgtagtcccagctactcaagaggctatggtaggaggatcgtttgaggctgtggtaagctatgatcaagccaccgcactccagcctgggcaacagagcgagaccccaactcttaaaaaaaaaaaaaggctaaacattttgcatacattcttatctaatcctctcctccctgaaaaatagatgctgtcatctccatttccaggagagataaccaaggctcagagaggtcaagcagcctgcaagtcacacagccagtaagcagcagagatgacttcacacttctgtgcctggaactctccgctctcgggatggtcactgctcctgctgatgctctcggggctgctcattctccagctcgtctctatcccagtcttgcttgtagggttccctgcctcccatgctgtgctccagcccgggggctgcctccattcccatgcagcatttctaccctccatgcctctgcctctcttgctgcactcccccatgaggactagaatcacctggctaggctgcctccccagctagattgtgagctccttaagggcagggattgtgtctcagctgcctctgtgctcccagtgccaagagcagtagctggctccgggaaggtgctcagttaatgtgctgttgaatggagcccatatttgggtgtatttaccatacacatgcacgcatgcacacacaacccaggtagaatcagaccatagaagtaggagccttggggtctggaagaggtctgggtttaggatctgagtcgcccaggcctggttatgcccatctgcccacacaggcccttggggaggagagcacctcctctctccagatccaggccagcaggcacagcctggcatgaggacatggccatcagaggtggccaccaggtggcaccagcatccatcttatgtgctgggtgagtggcagggggtgtcccacactgcctctcagacggaagcagaaacacctcattcaaccagcctcagcgcacgtgcctaattctgagcacgctagaggcctagccagcagtcacaaagttagtcacatccctgaagcccacccatcttttcagcgaagagcagaggcttctctaaagacagtggggtcggtgccactgggacagaacccagtggcccaccctcccagccggaggtagcttctgtttctttttcttttttttttttttgagacggagtttggagttttgctcttgttgctcaggctggagtgcaatggcgtgctctcggctcaccgcaacctctacctcctgtgttcaagcgattctcctgtctcagcctcccgagtagctgagatacaggcatgcgccaccacgcctggctaattttgtatttttggtagagacggggtttctccatgttggccaggctagtcttgaactcccgacctcaggtgatccgcccgcctcggcctcccaaagtgctgggattacaggcgtgagccaccgcgcccggcccacaggtagcttctcacacccaagccctccatgtacttgacagtcacggggctcaggctatgcgggccacatatggagctgacattttttacctgccttggggcccagcattagggactgaggactaagctgtgcctctagtctctggggggagggagcagggtcctaggcctctgaaacctgggctgggagctctgggggtcagccacccacatggcatccaacagcctctggaaaggggcatcaggtgggcactcacctgtcagccatctgtgggatgatgtaatgcccattcttgtgatctgaacaaaaataaaaatgccaagtcactcactagtgctgggtggcctcagcagctgggagcccacctcactgccatgagcagggctggcacccagaagtgtcaggggaaagtggggagggcaggccacccccaagaatgctgggagctcgtgggaggatgcaggatgcccacccccactccctagccccagcgatgctatggcccagagcctgcagtaatttcacaggagccagttgcctagcaacattgctccccagccgctctgtcaccatggcacctgctgccgggtgcgtccaggtcccacctgcccagccccagccaggcctgtcacagccaggcgccccccaagctctgctcacccggcttgcgtccacagaggtagaaggccagccggtcagtgagctcatattggcactcaaccagcctttccgccagctcatggtgccccgcctgcctgtgaggagggggtatggctcagacctgcagcagcagccctcacccacacccccacccacccacactgcacccttcagccgaccctcacctggcatagtcaatgggtgtgcggccattaacatcaggggagccagggtcagccccatacactacaagcagctcggcctgcagtgtctgtcctgccttggcagccacgtgcagaggtgtggtgcccttctctgggtggaagaagttggcctgggcacccagggagagcaggcgcagacatgtctccaggttgcctgtccgcacgctcgagtgtagttgctaagaggagcagagtgtgcagtgaatacgcatgtgcgtgaggcgcacctccccacccacaagctgcaccctggctgcccctgggacacctagcagctccaaggaggcctgcccaaaccagactatgtcgggaggacagaggcttcccgctaggggttaatgccaattaataaacgctgccgtcagtcaccatctaccacgtgtgctgtgtgccctgcttagatactatttatgaagtagatgctgttatttctttcccattttacagatgagtaaactgaggctatgagtggctaagcaactacccccaggttttcccagcttctgagtggcagctgtgggcttctagccttgtgtgtctacttggttgctggggagcctcagccacacacggcctgacccaacaatctgctctctccaccctgtctactgttaccctgacctggctgcctttggggcccagggctcagtggggacaaaggagaggccttcagagagtcgtggatgggaagaagaggagggggccacccatctgttgtagggcccctcaaaccttgctgaggtctttggcggtgactccatcatcgtcccggcagggaagcttgtgcacaaatgccagcatctggtacttggccctgatgaactctgacttgatggggctgcatggggcacacaggaggaatggggagcatggtgggagagggtggtcaccttgccacctcccagggccctgtcccggactgcgcagtctctgcccaccacccctccagccccactcactggactttgtcttgggggttggctttacgccggccgctctgcacttgtgcggggtccagcagggagtgctcccagatggagttggccccgttgctggcaagcgtgtgcaccatctgcagggaagagatgccaagtgagagagtgcccactgcgtgctaagcaatgggggaaacacttcctgagcgcctgctgtggctggcgtagctggaaacggtaccaagggggcctactgtgtgcccgcaccaccacacctccatctagtccagctgcccaaagacacagatcccatgagtgtgccaaggctcagagaggtgaagcaacttgctcaatgctacacgaccacgttgataagtggcagagcaggggtgtgagctactcttctgcatgaagtgagtagatgggaggaaagggtcaggattagcctctgccctaggggggtgctgccccttggaagctgcagattccagatgggggtgtatgtgggtgagggggaaacgccctcatgctcagcacactctgcctgaggggaaggaagaaccacccgactgagccctgtacctgcagcagcgtgggaggccaggcgctgtggcgaaggtgcttgacaatggagatgtggcgtcccaggctccggtgcacgctgcagcactcgtcacacaccagcacacccctgctgatggatgcccagccagggtctgccagggtgagggcaagggtcagccggagccagatgatgggccagacctcctgagcacctgctctggcccgtgccaagcctagtactctccacacattcactcactcagtctccaacagcctaggagctgggaccatcactacggccaggttaccagtgagggatctccccaagagctcacagctgggggctgacagagccatgccctttcctacatccttacccctctgggatatgcagtccccagggcccattcagcaggcacagtttcctgccctgcagccactgctaccagtctctcagccttttcccaggaaacgaggtctctgccccagcccgtcccgaagggaggaagggatccccaaggggatgcaacccagatgctgctgcatgccagatgctgttgaaacatgcctgacagatcacacccgtccacaggtcctgcctctggcctcctgccagcaggtgaggtcctttcatgctggagcctcctgccatcatcactgagggtgtaagctggagccctcttaaggaagatggacagagcaaaggagctgggcttgactgggcacccactaggtaccagctgggtacattatgtgtgatgctgcttgcaactgtcaggcaaggtaggacatgctacctctgtgatgaagaaacagtggctcagagaggttaaagggcttattcaaggatgcgaggctaatgagtagaattgccaggatgtggcactttcatgcctgagaccatgccatgtccacacttgctgctgtccctctgcctctatagcctgctctccactcttttgggaaaagtgaacttgggagaagaagcagggccaggactgggtgggagttccggggttcttctcaagggtggaggagatgccacccatcctaggccccttgggagacagctgcatacgactcaggctgcggaaaggtcacgggggagaaagcagccattgtgtgccgcctgagagtgggggcagggcgcctctctcccaggacactttgctctgcccagcggcccccaccctgtctcaggaaaccctgtcctggggtgggggtgggggactggctctctgccttgccctgtagcgctcagggtgttcagaagtatccccatcaggggagggacaggcttagggggataagaatctctcccaactagaaggcaattctcaggcctttcccctctaaggacttccaccaaagttcccaggaaaattgaggagactctgagtcaggggcccagcctgagctctgcccacagcaagtgacccccactgaggcatgaaaacaggaagtaaaggagagaggcctgtctttgggtttaggctttttttttttttttttttttgagacggagtcccgctctgtcgcccaggctggagtgcagcgggtttaggctttttaagggaccccctcccaatcagggcaacagagggatgcccaaggtgaccgccaacaccttcctggggggctgactccagggctcaggaggaagggaccagccttcttcgccaagagggggagccctagcatgcacttctgggctggctttacccaaatagtgaggcaccccaggtgtggagacctccctctccccactccaaacaccactgggtcagggggctgccagccagccacctccagcagcccaggcaggaagccggaaatgatgcagcccaaattcctcttggtggggtttcctgtaagtggggagccgcccagggcaggatcataaatgggctgatctgaggtctgtggtcctaccggagaagccaggcatggaaggctgactatatatccacggccaatggctccagagccctaagccatgggcagaccagatgtggtgagtgaccctggctatggcagtaaccaagaccaggatgcaggagtgtggtccaagggtttgcctggcactttcccccagcctgggggaggggttctccttctcctccaggtgacctgagaagaatggtaggcaaaggacactgtcctggtctgggcagccgctattggtgtcagctcatttctggatgacacagatgggacgcccaccctaaccattctgtctcctccctctgtgcaagtgcccttgggactacccagattgtagtttaaggtgaagggatccttgcgtcaagaagctccttggaccaaacctgggacggaaaggacaggaactgtaagggaactcgtcagccctccccctgcgcttctggctccaccggcagggtatgggtctgtatgtgtggagaggtagcaggcgtgatcctgggatcacgttaaccagtgccaaccccatggaggcctctactacggtgaattcctgccaccacctgaagccatcagtggcctccagggccagtaggtttgcacatacaggctagcctcaggcctccctcccctgagctaagggccagatctccactagactaagggaaaagcccacatcatgaaggcaggcgagagtagtccttggggtagagtcagaatggtggttacctctggggtgcacggactgggagggggtacttggaagccccctaaggtgatggaaatgttctataacatgcttgtctaacctgcagtccatatgcggcccaggcagctttgaatgtggcccaacacaaattcataaactttcttaaaacattatgagacttttttgtgactttattttttatttttatttttgcttgttttatttagctcaccagctatcattagtgttagcgtattttaggtgtggcccaagaaaattcttcttccaatgtggcccagggaagcaaaaagattggatacccttattctataacatgatcagagcagtagttacatgggtatacacacatgtaaaagcccatcaggatgaacactcaggtgcaggcattgacacacacaaattctacctccataagggaggaagaggagcccaacatttgtcccactctgcaatctacactatgaagagacaaatcagcctgtagcttgtcccgtaacatgtccccggccttgctcaccagagatacctacaggacaggcatcttgaggccttcactctcacccccagggttgccaaagtggaaaaggctgagatagaagcccatggggtgaggagaggcccttgactgagatcgtgtggcgaggtgggccaagcctaaggaaaggggaagatgcacattctccagggctccctgcccccttcctctcttggactccccaggcaggcaggaacacatacggtgcctgacgaggtggcacaagctgccagagcagccatgtcatgtccagctgcctagcaacacactcacacttgtcctgtgtgcccatgcccgggagcagagggaggatggggctctctggggacaggctgcatctcacctctgacctccatgaccccccaaattaaccaagcacaaaaagtccctggccccactcctgtggttaggactgcagggctcctatcataataaaagaagcctgtgaccctggggtggagcgatacaccatggggctggcactggatctggactccggactgctgggtaccctcatgcctctctgcctgagatgccacaggacccagaccaaacatgccgctgcatgccagggccagcatcctagggtccaggtgtgggatagtcccaagcagccagccagggtcctaacaagcagccaaacactcagggagtgcctgccatgtgctggacacctcgctgggtgctaggtgggctgatgagtaagactgtccacatcctccccaccccaccatcctcaccttctcaccaccttcctgacctctattgtgaatcaggggaaaggaggcatctggggcacaaattcctctgacagatgaggacctgggaggaggagctgggcaatccaacacatctgatgcccaccattcctccctgagcccactgggcatccagaggctgtggtcggacattcaacgcaacatacaaaggacaactgccttgctggtgctgcccttcacccctccaccccagaatcagaccacagattcggagatggcagccccccaaaaaccatttctactccaacttctttgcctctgaattgaggaagctgaggaccccacagtgaggaaagtcttgttgggattacagagtaagctgggaacaaaggcaacactaagccccagactcccccgattgggcgcctgctaagactctcctccacattccatgccatgcttaccccacggagttgtggaacagtggggagacatttataaggcaaggtgcatcctcagccctgccatccccagacctgcctgcagctcggggaacggagtcacagtttcttaggggtatggaccctcaaccccagggccctctaaaccatgataagcccctaggaggccttggtcataaccacctatggagtattttgtgcccaagccctgctaagtcatagttcccaaatactctagcttggcacccccagaaccaccagagcatctgtgaggctcaaccggtggggtcctgggcctgctcaaggggtggctgaaagttatgggcccacaaaccagcaccccatactctcactcttaatcatgcccacagccccgctagagttcacggacctccgcagcctgcccaggggcctaccagggagatagctcctttgctaaagaaagaatggatgtgggctagagcttccttcccaggccagctgcagagccccgtcactggctgtcctccctcatcagaagggagcagcctcttggatcattacccctgacttcctcagcaggcctggggggtttcactccagcccagtcctaactctgttaggaaaaggaagggaaccaccatgtaaatacagccaggagacaggccaggaagccagcaggatacggggaatctcggcacggcctcccacccatttctggccagactgggctaggggacagggaggggcccgcacccaggatagcttgatgccaagctcactttcccaagcaggccttaccggtgaacaggaacagcagggtccagccgagctgttcccagtcaccaccagcaggcctggggatgcctcccgagaagacacccgggtctagactggccctgaacgccaggcccggcaaggagcgctagccttaggaacccgaggcagggagtcctgggagtagccaccgctcatctgctcctgaggagacggtattcaggccccactggcgcatctgcccggccctctgctccttgccctccaccaccccggcaggcgtaccgaccacgcgagcagcaggtgcaagacgcgggggtggcactgagatgacataaaaccacactcgcccccacctcccaagccctgacggcctccgccacggccctcctgccaccccaggctggcgcttccgtcggatacagagatggaggtggaggagcagccagctgcccgcctccctcagaccgaggagcgggaggcggcgccgggaacgtccttcctcgctagtccacggcctccagggagcatgggcaccccaggccggccctcccgccaagggcgcagctccgcagtggccgaggcgggggcccagcctggaggccgcagccccccgccccgcccagccctccggccccgcacagcgctcttgccaggccccggcgcccgcccggcggcggcctggctgtgcggtcccgcccccggccccgccgcgcttacccggggcgctgcagtccgcacacacctccgctcgcggcccctttcgggacatcctcagcggcgacgcggccgcagccctctgggccagcgtggggggcgcgggcggcgggcccgggcggcggcggcggcccctgctgcccggcccggctccggcgaggccccggcgaggctccgcgcgcccggccaaccgtccgccccggggctggcccggaacccgccgtgcccgcctgcccgctcgccctcgggcgccctccgccccgcgccgccccgccgccgctcgcggctcctctctccgccccctgcgcggctcccggccgcttctgcaggaagcggcgcaggccctgcccacagggggaggggccgcacccccgccccgccgcgcgctgccggccgcgccccctagagaaaggaagcccgggcgcgggcaggagggggcgggggcgcttaaaggggccgcggcagatgcccggccccggcgggcagcgtggcctgcggccctggcctccgctgcagcgctcgcctggcccggaggcaatgtgagtcaccctcacagccccctccccttcactttccgcgtggggtggaccgggggacgctgggcccacggacggcgagggtggggattagggaagaaggacttggaggcccaagtcccgctccaggtcaaaggggctgtgccttggggtacccgtctatctctggttggggtgaggtgtgcgtccctgtcccgtaggtgtccacatctgtgtgtccaggggtgtgtgtgtatgtgtcacactcttgctgaatacgcccactgctaacaatatggacgcccaggtgccagaaaggtcaggcagtgtattcccctgcctccggactaaaaatatatctatctctccatgcatccttccatccagagaggagagaatctgggcggtttttaaagacctcccgaggagtgaccactgtgcctgtgtgcactcacatccacttgtcatccgccttacacacacccacggtgtttctgggccaccagaggtgtgtgtgtccagaaagggtgcatataacatagaggggccgtttcaggtgacggcctttcttcctggacttcacacgacgaggcaggcaaaggcaaggcaggtgagggacgtgggtgggctggggggcagggagcctaggtagaggccgcacatgagcgcagcccccgcactgagcatgcgcccccatacgcgtgtgccgcgcgtgtacccaacccccaatccctgcagcagcaaaaggcccgggcactctgcttgtggggagagggtagaggtccccagggccagacctgggggccaggtcagtggtgacaattgaggaggggttctccaagagtcagagactcctgcttgttaagatgggggcagtcctttggcaggggtgctcaagttggtcgattatcccaacggtgccagagcggcagtgatttgtgggtgggcaggctccttccctaggggagacaagtaatgctcatgagtcacaccacccgaaatacatgcaaagctgcctccatcgccttttgctgcggcccagattgacaagtttgtttgaaatcgcgatccatgggctttatttataattgcaccttaaaaaaatcttgcaggcctcccctccctcgacagccagccgctcagctggtggggcttttgcaagcaacgatacctagctggtgtgtaggggggagcaccacctgccgccccgagctgctctctcaccagagtccatgggcttggtggcctcagcgggaagggggtaaggggcggggggagtgagacgggaggagtggccaggcagcccgtgccaggcgctcagtccacgagcggtggccgcccgttcacccccgatcgacccccagctatggaatttcatttattaaatgtcgaggaggctgctggcagccctgccgcttggctgtctttgtttctccgctgtgtgggcgcgtctcgagcacgtggcagctgagagcgcgggccgaagcgcaagcgacctgggttcagtgtctaccgccgcctggcaaaaaaagaacacggccgcccaggggacagttccccacaatcgacaactccccacaatccatcctgaactccccctgtcctcggactcctgggctttgctggggaagaaggatgattcactctgcttacccctccaccccactccccatctcctggttggctcagagactacctgggagtggccctggcgcggacacatcgtccaaactttgtttcccccagccccgtcacagccaaacttctgggcctgggactggagataaaagggtttctggattcccccgtggagatgtcaccaccccaggaagcaggactgctacagtggaatcacacacaaggttcgaaaaacaatttaataaggaaatgcacaggcatgctcccggccactcctagatgcccctcaaccgcgccagccccctcccctgcactggctgcagccacgacactctgctgacccctggtggtgcaggcgggcagcggtcccgggcccccggagacgccagctggctcctcccaggcgggagaaaggggcgaggcagcccgctcctccctcatctcttcccgctggggcctggcaccacagggtgtggaggaggaaggagggaagaccacacaaagaaacctgagagagtttgcaagcttttgctggcacctcccacacaaacacttcttggattgttgttttaagtagggccggtgtggaatcccttattcctgccttgttctgaggtgggctcaagaaggcaccgtgcctggtcccgccacctgtctcggcccgcctggttgggggagggaggcgctgtttccagggcagtcattatccttagctcaccccaggaggtagtatctagattctcattttgaaggggagtggaccgagaaagtcggaaaaattaagcagtttgctcttttaaggtcaggcagttggagctattcgaactctggtctctctgacatcacagtcccctccctccagggactggtccaagcctcttggtccttccaggccttgcaattggcgcttgagaggccaattcaacttttaccacaccctctgcagggaccattctggaagtacctcttcaccctggggtcattcaggaaggagacagtctctggaatcagtcacttcccttcctgaagggccagctgggtggaggaacggagctgccacctgctgctttttctgtccaacctcactctggttcttgctggggacagtgtgcggggggaaagggaccatctttcccgcgttactggacattctgtttccaatgacatgtgtggaagatggagtttaattttctaacagggcagggaagactcctcagaaatgttccaggggccagacccctggctgctccaatgacccttggtactgatgccccacacctttctcaggagttcccaatcagacgctctcttctgggaatccggatccttcttcatggcccctgggacccaagctcaattctgaagaccacacctccaccccgtctcccaaacgctcgacctaggcccgtgcccccccacttccccagcaaaaggcaaaatgccagcgggggaggtgcgtcccagcccacctggcgtcagggccccgcccgcgtctgggccaggcctgactccccgcccactctcccacgagatccggggacagtgcagaccctcttcggccacctgccacccccagtttcacgaggcggactacaaaccccatgatgccgcggggctgagctgacaagctctacccggggcgcctggtccccttcctctctccccatcatccccacatccccgtatcccgcgccggccgctcgggctgagggccgggctatgcagctgtggggacccgggggctgcgggcgcgcgtccctgcggcggcgtccccggggcccgcgtcccgtgcgcccccgcgcccgctgcgggcgcctgctccctccgccgagcggcgtctttgtgtgcgggggtgtgggaggcgagcgcgagtccgcgcagcgccgccgagtgcccgctccctcccagggcgggtgggggcctctccgcgccgcccgccgccgccgcctcgcgaggacgcccgtcgcccgcgccgcccgcaccgcgccgggcgcgccgcccccgcccgccgccgctcgcacatgcccgagccgcagccccgcgagcaggcagcgccggccccccgccccgcggccccgggccccggctccggcgccgtccctcctccccggccgggcgccgcggccccggcatgaggagcgggcgatgatccccgccaacgcctccgccaggaaggggcccgagggcaagtatccgctgcactacctcgtgtggcacaaccgccaccgcgagctggagaaggaggtccgcgcgggccaggtaggagcgccttcggggcgccgcggggaccccgcggccgggcacgcccgtccggcctggggagggggtgcggcgcgggctgtcccgcctccctggcgagtttgcggcgcgtctttgtttgcggccgcggcttttgtgcttgttgaccgggaaagggtgatcccctccggccgggacgggcgggaccacacgtgtttcggactcacctagatgagagtagaggcctctgtgcccctcctccgccggggcagtgagggctgcagggaggggctgcgggctgtgtcggtgttccatgtggtgggagagtccgccccagccagttgagcggcgacacctcccgagtgagggtgcggaggtgggaaaggcttgcgtggggagggggccataggtcaagaatggggaagaggctgtgtcacactcccaggcaccccagccccacccagcgccctctccccaacggtgagcgctttctcttttagctctcaaactgggcagatccttggatctctcagagcccagccccagctcaggaacagggagtggagaaagaccctcttgggaggccccaagggccttgtccaggtgctgaaaagcgctctcctgccctctggtgctggggcctggtttctaggcgcagaggaagctgaggggccctggctgctggaaggacttgaggttctgcgcaccaggtgggctccctggtttctgctggtcagtaaggccacgtgggtcaccagctttgggctgggcagtggtctccagaaaacaggggaaggggggatgtcttctggccatgcttcaggatgtcttctggccatgcttcagaacaaaggcaggcacaggtcacagattgccacttctgcccttggcacccaggccacaggtaggcactcatggcagagatgaccccccgcctccagggtgggctgcaagagccagagctgggcccgggtcccatggcttgctgcaggctgagaaccccagttttggactgggtctgagaccttggggccatgggctgggggtggttagcgcagttgcccgctgtgggaatttaccttctgagggctgcttattgagtcatgagaagttcagtctgaggagctgtgcaatcgccaagggaagcatggaggtggagggcaggccatcggactgagcaggctgggggtcaggatgtgtctctgaagtcccacgctgagccagcccccaggcctgcatggcatccagctctgcatggcagtccctgtaaatatgcgagtgacctgtgcccgcaggcctctgggccggtctgggtggccacttcctgttacctgtgcctatgccagcactctccgagtttctcctcagactgaactcctcagaccctgtctttgtttatctatcataaaggcagtgctctgcagccacgagaagcctgttaaagagagtgggtcacagtgcccccaggaaacagatgaacaaacagggcatcaacccctgccctcaaggagtctctgttctggtgaagcaagtgtgaacaggaaattccagggtgatgtgcaaagcgctaagacatggccagccagcctctgctggctcttctctgctttccttccctgaaagcaaaagaagacaagcctcatgtgggaagaacttcccaggggtccaaggatcactaggcagaaggctgaatctccagaatgcctcagtcccactcccttgcctgagggtgggtggtccttttactgcagagactggagagaggcagaatgccctgggagaaaagacttctccagcaggcctctctgctgataatcctgaagtgggtggccatcttgctggggtaaggttggggtggggggcaccggagccgctgcaggtagaggtgttgggggctgctcatgtgtttctctctcccacccctctggctgcctcagaaacaaggtcccagattcacccctacccctgccccagtgagttaatgtctccttgaaatggacactgcctgtcctggatccaggccagggggaatatagggcactggtggaggttaacccttgttcaaccacagaggagccaggccagtcctctccttccctcaggcgtgccaaaaagaggaatgccactccgtgtaggtgggagagttccctagctgtctcccctctcgaggactggcccagagtgaggcttgtatccagatgtacactgcctactccccagggcaccaggctctgttttctgcaagggggacctggggacagccacctaacatcatgagaaaagcactgtggaaccctggcatcccagccaggggtccctggcctctagtccccctggtaccagccgccacagaaacagctcggctttcctcaagcactcaggagccaggtttccctggtcttggcttggcatagctgcctcttcttcactccaagaaagccccgcagaggccctccgtgggcaggcttggcagtgcagctggctgaggagggggccagcatggccaccttcagagcaggttaatgggctttgctcagccccaaattgctctgctggaggctggaagcagggagtgatgggcagataggaggtgcctggtgaagggaaggggcacccagcagtgctgtgatgccagcccggtgccctgcttgccgctatgcatgttctctgccaggtcgggggggacagggttgtaagccagggaatatgccagttcccccttgcctggcatggccagctgggcatggtcctggttctggagtcgtgagttcctggtgttccctggggtgggaacagggggaagggttagcctgtgcagctcccgtgggagggacatgtgtgggctgggcctggggagcaggactctgcccctggcaaccagaaccctgaagtgggcagattgtggtcccagagaatcattttccttctccctggggcgttctccaccgtgggcttgcttcctgctttccctgttcacccttctgacctagaggcaggggagatgggttgtggggcccaggatgtgcgaggagcacctcagacccctccctttgcctacactgggcagtcctggatgtggggcatcaccacagctggtaagctaggaagctcgggagagggagccacaaaccccagaaaccaaaaatcaatgtgttctgggatgagggggaggggctgcaagggcaggatgggaggggtgacatggagggagaagtccagggtgcggtccccacagcccgtggcctcctacgcagcttgaggatgcatcctgcctccctccccttgaatgagctcaggcagacctgcccctgcaccccacgctgggcaggagaggtcaagcaacgactacaccagactcctgccttcctcctcgtgggctggggaaggggctgagcaggcaccaccttgagcacaggctctgcgtccctcaccttcctcgcaagcactgtgtttagtccatacatgagatgtatgcttttcatacttcccttaacaaaaggattctgctcatgctaaaggagtttggaaagtaccctgctagtgcacatgggtgtgaggggtgttcctgtgcaaatacgcacacacacgttacacaggagtggactcctgcagggccagaaggcagctgggcatgcatgtgcttgtacacttaagggcacacgtgagtacctatgagcgtacgagtgtgtatctgtatggtaccagtgtgtactagagtgtggtgtgtgtgcctgagtggaggtagggaggctctctgcccagggacccccagctacaaaactccaaagactccaccttttgactccagctgaggcctgctgggataaggaatctccgttctcttggtggggagggctgggtgttgggtttcatgggaaaccttttcattccagcaattaaatagctagaggcctctgctgaggagaagctggaggcctctgctgaggagattaatgaattctcctacctgggcccagggcaaggtgccacttacactgcaggcggcactctgggcttgtggggagagctgctctggagcttggctgagtgtatggggttctgcatggggtgtatggggtgctgagccatccaggcctccctggggagtgctcctgaggtgtggggatggggaggagcaccctgcttgcaaggaagtgccagccgctctctggagcctggagctgaggcacctgatggggaggtggaggcagcatctggagccctgaggccaggcagcggcctgccagctccctagggtcttattagctgcagcggctgcggctgcagcatctggggcagggctgggaggcctggattgctcagcacttccccagtcagctcgggccctgtggccctctcccactcccgctgccgggctcaggaccccacccaggttgcaagccccggagtccagcccaaccaggattggacaagagtaaacaacactccccttctctgtgaggggccacagctcagaggccaacaggggccaggcccgctggtttttttgaggctcccagtatattgaaaaatgaagaaattccaggacaaggctataaaaattatataaataatcttaaattatttaaaatgtttcatttttgacaatggagttcatggtcatgctttaaaatatttaactgttgctagaagatgcgtaatgaaaagcagtgctccttgctccgcctctcccacctccccagcactctggactccttttgtcatttacctccctaattataaacaatatattgtttatactgccctctcccctccccttctccctccctccctcccttccctgcctccctccctttctctttctttcttcttcttttttttcttttttcatgagacagcgtctcactctgtcacccaggctggagtgcagtagtgtgatcacagctcagtgcagcctctgcctcccaggctcaggtgatcctcccatctcagcctcccaaggagctaggactacaggtggtgccaccatgcctggctaatttttgtatttttttttgtagagatggggtcttgccatgttgctcaggctggtctcgaactcctgagctcaagtgatccacctactttggcctcccaaagtgctgggattacagacgtgagccccccggcataaacaatatacttctgcaatgatttcttggttaattaccttcccctccttgtgccccctcagcctagtactctatgcatttgtctagcaaatatttatgtgccaggtgctgcctggggagtggggaaccagcagtgaacaaagcaggcagggacctggctgatggggcttctgttcgaggtgcaggaggtgctcaacaggcacttggacgggcagtggatagagccatagcagctgttacctcagatgggctgtcagggtgggcttttctaaggaggtgacatttgagcagcagcctgagtgaagggagggagaaagctttggggctctctggaggatcctggagaacgttccggggaaggccattggcgaagggtggagcaaatgagttcaaagagaagtctggggccattggattccctgctacctacgatggaaagccactggaagattttgaactaaagagtgtcaggacctgagtaacacttcacagggtgactttagctgccataggtgaggtggacaatagagcctggcaaccggggagcagcaaagaggcagtagggggctgccagtgagagatgggggggcaacagctgcaaggtagtggaaactgggcggcttctaggtctgttttggaggcagagcctacaagtttttctgatgggttagatgtggagggtgcgggaaaaagaagagatgtagacagttttaaagttggtttttttttccacctgaaaatgcagtaaatccaggtgatgtttactgtttatgggggcaggtgcagctgtccaggaatgcagaaaacaaggaaaagttaagaaagtcacttccagaatgaagaaggcaagagaaagggcaggagacgtcatggaaagccaggctgtcccattttgtttcatgaattcaatgatctttttatatttttcctgaggatgtaaattactgttttcccccaaagagttttcttttattccctgcatcaagagaatttcctctgggttcttagcatctaatttgtttttttttttttttttttttttttttttgatacggagtctcgctctgtcccccgcgctagagtgcagtggcgcaatctcggctcactgcaagctccgcctcccgggttcacaccattctcctgcctcagcctcccgagtagctgtgactacaggcgcccgccaccacgcccagctaattttttgtatttttagtagagacggggtttcaccgtgttagccaggatggtctcgatctcctgacctcgtgatccgcccacctcggcctcccaaagagctgggattacaggcgtgagccactgcacccagccgtcttagcatctaatttgtatgttttggtttatttcacatgggaagctttcatcaagtgtccagtttctcctggctgttgggtcatatttaagaatggggctggggagctcagggatgtgtgggtgctactgtaaggtgatcaggtggcaggctggcctgttcattgtagggtcaccagatgtctgtattctgaggtctttgggacaacttcctactcgggtagatagggtggtggtggtgtgacctggctgccagtggttcaggacccaggtagggaaggggctggggtttcacggatcactggctttcagcaccatacctcatcctctgctgtggccaatgctcctgagtccagagcatctcatgcccaatttctacaaagaataaacccctggtgtcctgtggtgaggaaggggggcatctcccagcttaatgaggctgggaaggggaccaggggatcctgaattgtaaccagcctccctgcactcagctctagcttcacctccacctctgccatccccattgcctgcaggtcctacctacacctttcaggggggctgggggtcacctggcttgctccttatgtggacgtttccctctgtggctgctttagtttcagcttcctctgctcccctaagtcagttgtgaggccccagccactttccatgttctaaagttgtgttgaagtttctcatctgctgacatctcttctctttattcttgtgggttttaaatattttactgacttttttttttttttttttttgagacagggtctggctttgttgcctaggctggagtgcagtgggatgatctctgctcactgcaacctctggctccctggctcaagggatcctcccacctcagcctcccagtagctgggacgataggcatgcaccaccacgcctggctaattttagtatttttttgtagcacagagtttcaccacattgcccacgctggtttcaaactcctgggctcaagtgatctgcccacctcggcctcccaaagcttacaggcatgagccactgcgcccagcctgacattctttttttttttttttgagacagagtctctctctgtcacccaggctggagtgcagtggtgcgatctctgttcactgcaacctccacctcccaggttcaagcgattcttgtgcctcagcctccctagtagctgggattacaggaatcccccaccacgcccagctaatttttgtatttttagtagagatggggtttcaccatgttggccaggctggtctcaaactcctgacctctggtgacctgcccgcctcggcctcccaaagtgctgggattacaggcatgagccactgtgcctggcctcctgacattcttatacatttaacattttttggcactcttcaatcctttgtacagattcaagtttctatctgggatcattttctttccacctgaagaactccctttaacatttcctgcacatctggcaataaattcccttagaatttgtttgtctgccaacatatttatttcttcttcagttttgaagaatattttcaccgggtatggaattctaggtcaataccagtcatactggattagagaaaaaaaaaaaaagaattctaggttgaaagtttttgtttttgtttttttcccccagcactttaaagatttcattatattgtttcctggcttacatagtttctgatgagaagaatatagtatttcctgtatctgttcttccatacataatggacctcatttctttgaatgcttttaggattttctttttaccactagttttcagcatttgattatgatggaccttggtgtagtttacttcgtgtttgtcttacttggggttcattgaatttcttggttcttggctttatcttggtattagtttccacaacaaattactacaaactaggtgggttaaaacaacaaatatttggccgggtgtggtggctcacgcctgtaatcccagcattttgggaggccgaggcgggcggatcacgaggtcaggagatcgagaccatgctggctaacacggtgaaaccccgtctctactaaaaatacaaaaaattagccgggcgtggtggtgggtgcctgtaatcccagctacttgggaggctgaggcaggagaatggcgtgaaccggggaagcggagcttacagtgagctgagatcacgccactgcactccagcctgggcgacagagtgagattccatctcaaaaaaaaaaaaaaaaaatttattctgtcacagttcgggagacataaatacaaatttgagatgttggcagggtggcagtccttccaaaggctctagggaagagtcctgccttgtctctttcagattctggtgactgggccacaaccctcttggcttgtggctgcagaactctagtctctgcctccgtcttcacatggccttcccacctctctgagtgtcttagaaagacacctgtcattggatttagggccccctgggtgatccaggattatttcatcttgagatccttaacttaattatgtctgcaaagacccttttttgaaataaggtctcattcataggctgtgagggtcagaatgtgatgtggacatgtcttaggaggggcaccattcttcaacccaccatagtagtttttatcaagtttggaaaaattttggacgttctttctttcttttattatttatttacttattttgaaatggagtctccctctgtcgcccaagctggagtgcagtgacacgatctcggctcattgcaacctccccttcccgggttcaagcgattctcctgcctcagcccccaagtagctgggactacaggtgcccaccaccacgcctggctaatttttgtatttttagtaaaaatggggtttcaccatattggccaggctggtctcaaactcctgatgttgtgatccacccgccttggcctcccaaagtactgggattacaggcgtgagccaccgcacccggcctatttctctaaatttgtcttatttgtcctacttctttattctgtcctttgggattccaatagatatatgttacaatgcttgataatgtcttacagattatgaggctccatagagacagggtcttgctctgttgcccaggctggagtgcagtggcgtgatcatagctcactgcagcctcgaactcctgggctcaagggatcctcctgcctcagcttcagaggagctgggactacagctgcttgccaccatgcccagctaatgtaaaagttgttttgttttgttttgttttgtttgtagagacagagtcttgctgtattgcctgggctggtcttaaactcctgaactcaagccaacctcccgccttggcctccaaaagtgctgggactatagaagcccagccaactttatttttcagtactgtttttctcctctgtgcttcagtttggaaagttctattgctgtcttcaaattcactgatttttaaattgtgcagtgtctaatctgctgttatttccattcagtgaatttttcatttcagttactgtacttactatctttagatggtccactgggttcttttttatacctctcattcctctcctcatgaacatctttttcatgtttttctttaaactcttgagtatattgagccatctatcatctttatcatttctgagttttgtttctatgaaattatttttctcctgattataggttatattttctttcttttttttttttttttgagatggagtctctctctctgttgcccaggctggagtgcaggggcgccatctcggctcactgcaagctcgatctcctgacctcgtgatccacccgcctcagcctcccaaaatgctgggattacaggctcacgtgagccaccgcaccctgcctataagttttattttcctactttttggcatatctagtaatttttaactgaattttggacattgtaaatatgatgttaagcatctggatttgttattgttctttaaagagtgttgggctttgttcaggcagactaggtaaattacttgcaaatcagtttgacctttttgaggcttttttttttgagacagagtcttgctctgtcacccaggcttgagtgcagtggggcaatctcagctcattgcagcctcaacctcctgggcttaagggatcctcctgcctcagtcactgagtagctgaggctacaggcacatgctaccatacctggctaattttttgtattttttgtagacatggggttttggtatgttgcccaggctggtcttgaactcctaggctcaagtgatctgcctgcctcagcctcccaaagtgctgggattagaggtgtgagccaccgtgcctggcctttgatgctaatttttctttttctttttcttttcttttcttttttttttttgagatggagtcttgctctgtcacccaggccagagtgtagtggtgcagtcttggctcactgcaacctccgcctcctgggttcaagtgattcttgtgcctcagcctcctgagtagctgggattacaggcacccatcaccaagcccggctaattttttgtatttttagtagagatgtggtttcgccattttggccaggctggtcttgaactcctgacctcaggtgatctgcccgcctccgcctcccaaagtgctgggattacaggcatgagccactgcacccggcctgaggctaatttttaatctgttagggtgggtctaggtgagccttttctctagggatagtttagctctactgctaaggcataacccttctgaggtctgattaaatatgcatctccactctaggaggctggagcttgattatctccttgcttttggtgagctctgagaatttaccattttattgctcctttttgtgtggtcttactgagtttcactatacacatgtgaagtttagtattcaggaagacttgaagagacccctatgcagatttctggagttttttgagtagtttactcttttccagaactgtgctctgctgcaacctttaataccttggcttccctgaatcctgtctccatcttctcaactcaggaagagcaccatgctctgctcgggcttcccctccttgaattacagtctggaatgttcctccaggcagaaatccagggatgttacagagctcaccttgttcattttccttacttcagggatcacagttctggacttctaaaaacagctatttctctttacatatattttctatatagagaaatatatatatatacacacacaaacacacacacacacacacatacacacacacatatatatatacacacacacgcatatgtatatatatatttgagacagcgtctcactctgttgcccagcctggagtgcagaggtgtgatgatacctcactgcagcctcaacctcccaggcttaagcgatcctcccacctcagcctctgagtagctgggactacaggcacaggccatcatacccggctaattcttttgtattttttgtagagatggggttttgccatattgcccaggctgatctctaactcctgggctcaagcaatccgccaacctttgcctcccaaattgctgggattacaggggtgagcctctgtgcccagccttcatatattttgcagcaataattttctcattgtttatggtggcagagtaatttcatttattatggtaggagtagaagcctttttactggcgttttaatcaagttcagagaagaggagggagttacatgcatgtggtcagttcactgttccttttttttttgagacggagttttgctcttgtcgcccaggctggagtgcagtggcatgatctcggctcactgcaacctccgcctcccgggttcaagcggttctcttgcctcagcctcctgattagctgggattacaggcatgggccaccacgcctggctaattttgtatttttagtagagatggggtttctccatgttgtcaggctggtctcgaactcccaacctcaggtgatctacccgcctcggcctcccaaagtgctgggattacaggcgtgagctaccgcgcctggcctgtcagttcactgttcttaaccagaagtcctagactctcgaaatatatttaaatacttatgcttaagaccgggcgtggtggctcacgcctgtaatcccaacactttgggaggccaaggcaggcgaatcacttgaggtcaggagttagagaccagcctgggcaacatatcaaaaccccgtctctactaaaatacaaaaattagcctggcatagtggtgctcgcctgtaatcccagctactcagaaggctgaggcacaagaatcgcttgaacctgggaggcggaagttgcaatgagccaagatggcaccactgcactctagcctgggtgacacagtgagactctgtctcaaaaaacaaacaaacaaacaaacaaacaaaacttacgtttaacaaacatgctttctaagccaggtgcaggggcttgtaatcccagctgcttgggaggctgaaacaggaggattgctcaagcctaggagtttgagaccagcctgggtgacatagtgagaccctgtctcaagtaaaaaaaaaaaaaaaaaaaaaaaaaaaaaaaatcttttgtctgggcactgcggctcacacctgtaatcccagcactttgggagcccgagccaggtggatcacctgaggtcaggagttcaagactagcctggccaacatggtgaaaacccatctctactaaaaatacaaaaaattagccagacgtgttggcgaatgtctgtaatcccagctacttgggaggctgaggcaggagaatcgcttgaacctgggagacggaggttacagcgagctgatatcacgtcattgtactccagcctagccaacagagtgagactccgtccccccaaaaaaaacacaaaaaaaaaccccaaaaaaagcttttatcacttttatcacacaacagaaatctcatgcaatgtaatcatgttattcacaaaattataggatttgtacaaattttaatgcatagtgtcccacaagcacaggacatggttgtgaaattgtattaataccatgaacttgttatttcattcctgtctgtgtattactgtaaccgtttgttaaacctcactcagtgataatgtcagtgatctaaattggtagctcttcctgaaggtggcctgggacccttagggtaggtctggtcccaggtgagctccttggccaacagcctctttgccaccccacttcagtcccaggcttattcttggcaggcaggccactgggccctggaggagaggacccagccaggggcccttggtggacaggaagggaggaagccctccctcttccagagttactttctgtcctgtcttctaagcccctttccatccacgtgtctgtctttccgttgctcatagtgtctgtctttccgttgcccatagtgtctgtctttccgttgccttgtgaggttggtgaggcagagcagccccagcagggggtgggggttgctgcctgctccagggctgtctggctccggagggctgcctccgacgtgactggggctttatcttccactcctcctcctcctccaggtggacatcgagcagctggatccccgcggccggactcccctgcacctggccaccacgctggggcaccttgagtgtgcccgtgtgctcctggcgcacggcgcagacgtgggcagggagaatcgcagcggctggacaggtgggcagccctgctcaccccagccccacagccggggcctccccagcatcatagacctatggttggctgaagggtcctgccctgtgaccttgcctcgccctcccccagtgctccaggaggctgtgagtacccgggacctggagctggtgcagctggtgcttcggtaccgggactaccagcgggtggtgaagcggctggcgggcatccccgtgctcctggagaagctgcgcaaggtgaggcccagcctctcagcctccacgggagcccttgagcccttctccagtgcagacttagcctctctccccttcgtcctccaggcccaggacttctacgtggagatgaaatgggagttcactagctggggtaagcgggctgcagcaggtcgcttctgggctctcccactttaggtcctgcgcttgctcccctgcctggaatgtgttctcatagttcttccggcggttccctctatgccttagctcagctcagggccaccgcctcagctaggcctttccagattgccccagatactgtcttgactccattattattctcttcactctgtcatgatttgcttactgtattcatgacctgccgctccttgttagaaggtaagctctgagagggcaggagtcctgtctttttcactgttgtattcccagtggctggaacactcagtaggtgtttcataaatatttgttgaaagaatggatgaaagagtgagtgagtgaattaacaaatgatggacactagggacttagtggtgacagaaacatgcccgtcccgacctcaggttgctcttctgtgtgagtatggtctacactggccagggagggggttttggaggagaggctgctctctcttcagttccctcccctgttcctggccacacggatcccaaaccccatgccctgagctggtccaggccgtgtaggccagaccagtcaaagccacctccaacctccgcttccaccagtgcccctggtgtccaagatctgccctagtgacacctacaaagtgtggaagagcggccagaacctgagggtagacaccacactcctgggctttgaccacatgacctggcagcgagggaaccgcagctttgtcttcaggggccaaggtcaggcaggcaggaagtggggcagggtggggacgatgggaggcagccccaggccacccctgatccccctgtgctgttccgtgtctggcagacacaagcgccgtggtcatggagattgaccacgaccgccgggtggtgtacacagagactctggcactggctgggcaggaccgggagctgctgctggctgctgctcagcccactgaggaacaggtgctgagccggcttaccgcgcccgtcgtcaccactcagcttgacaccaagaatatctcctttgagaggtgggtggacatggccttggtcacccttgagccagcccggtggggtgcctgcctcacctggaccactctgcttccccaggaacaagactggcatcctgggctggcgcagtgaaaagacggagatggtgaatgggtatgaagctaaggtgaggctgcagctcccagctgccagcccagctgcactcttgcctacagcaagctgtacaggggattctgacctcccttccccagccctggaggtacagaagcaatgcagcgtggtcaagcacttatatttgggttcaaggcacttctctggtgttttatatggatgtatggatgtatacacagggcacgtgcacacgcacacacacacacacatttattcctcacagcaaccctttctggtaggtgctgttctgttagtattcccattttacgcatgtttattgagtcctttccttggcatcccatttactcttcacaacaaccccaggaagtagggatgatcggtccattttatgatgaggaaatagaggcttagagtggttctgtgacctgtacaaggtcacacagctgttaagtggcagagttggggttcagatcctggctggcctgaccctagagccaggcctttatccctaaaaatgactgcctggctgggcatggtggctcatgcctgtaatcccagcgctttgggaggccgaggtgagcggatcacctgaggtcagttcgagaccagcctggctaacatggtgaaaccccgtctctactaacaatacaaaaaattagccgggtgtggtagcaggcgcctgtaatcccagctactcgggaggctgaggcaggagaattgcttgaacctgggaggcggagcttgcagtgtgcagcgatcccgccacagcactccagcctgggcaacagagcgagactccatctaaaaaaaaaaaaaaaaaaaggctctgcctgttactctgggacccctatgttgcccacgacatgaaagcaggaactaacaaatgccatgggttttgtgtgtggcatctcctctgaaagcctcccctgcttctgtagtctgggaaggcctctgtgctacccccaccagtgcatggaccatgctgttataactccattttattgtctccttatagagattgtaagtctcaggagggcagggatcatgtttggcttgtttactgtatccctgatgcctacctcaatgcctggcacataaaggctcctcaaaaaatgtttgttgaatgaataagtgaatgaatgaatgaatgaatgacctcatatattcacttacccaaaagcctgaagcagagtctctccaggaccctttgctacagggagtgttcccagtgcccttaggggtaagacacagggtaagaccagaactgcttatgagccctttcttcatctgtccccaggtgtatggggcatctaacgtggagctcatcacccgcacacggacagaacatctttcagaacagcacaagggcaaggtcaaaggtaatgaggcagagctggatggggagaggtgttgcaggactgcgggaaccagctcccacttcagtgcttccatcagtattcccactggcatcctagcaagaggctggatgctttattcaggccgatagatttcaattcaggtgccaagccctaaggatgggtagtggctgcctagagtactaagaagtttctaaggactcatctgggttcagtggagagccatgctgcaagtgattactaatgttgctgttgaatttgggagaggagagaaatgccatgtatgccatttattggccattctagtctagtgggacatatcctaggtagaaagtcaggggaccttgccacagattctgtatgcccattgatgccacacctgattctctgggtaccagataccgtgtccgaggtgaaaaagcataatttctacctcacaggggaacaacatgaaatcatgcctatggaagtgcctgaagcaaacacacacacgcacatgcacaccccacagtgcctgccggggcaggcgttttactgtccagggtcaccgagctggagaggagcacttttggaagttgcttctgacctctaggccttccttttagtgttttaagctgtgctcacagaggccctggcccctggtccttgaagcactcagtccccttcaggtgaaggtgcctgagtatgtggttgggtgagcaggccccaccccaggaaccggcctcctccctaggtcttgggtgctgtcacctctgatgaggtgcccaggtgtgtgtggagttgcggtgtcctctgagatgccacatttcttgtaggctgtaagacacctttgcagtccttcctgggaatcgctgagcagcacgggggcccccaaaatggggtgagtgtgtgcaggggtacccgtaagtggagggatgtggatgtggctcaggaggaggcttgggaagcgtcctgcttagcatggcctatgtggacctcctttccacaatgcccaaggccatgtcagcgccacactggcagaggggacagcttgggggccttgtgacaacaaatgagttggcctggcattaggaactgaggggagctcctgggcccctccccatgtggtacagaccctgatcactcagactctgagccaagccaaccccactgccatcactgcagaagaatacttcaaccccaactttgagctgggcaaccgtgatatgggccgccccatggaactgaccaccaagacacagaagtgaggcccctgccggtgctgggaaggtggggggccggggctccaggagatgctgggaggccatggcttcctgcagtgtcccttaccccttgggatctggtgggggcaggttcaaggccaagctgtggctgtgtgaggagcatcccctgtccctgtgtgagcaggtggcccccatcattgacctcatggccgtcagcaatgcgctttttgccaagctccgggacttcatcaccctgcgtctgcctcctggcttcccagttaagattggtgagaccgcacggccatttctcctgagcccgtggcgggccgaccggggtttagatgaggtcggggtggggctgaggctgaggtgtgaggggctgagtggtggcgcctaaaggtttcctcatcctcagaaatcccgatcttccacatcctcaacgcccgcatcaccttcgggaacctcaacggctgcgacgaaccggtgccatcggtgcgaggcagccccagcagcgagacgccttccccaggcagcgactcctccagcgtcagcagctccagctccacgagtgaggccccccgcgagaacgcctgcccctcggctctccccggggtgggtgggaggggcgcgcccggccgtgcctgacccagcccccgcgcccccagcctcctgccgcggctgcgagatctccccagcgttgttcgaggccccgcgcggctacagcatgatgggcggccagcgggaggcggcgacccgggacgacgacgacgacctgctgcaattcgccatccagcagagcctgcttgaggcgggcagtgagtatgaccaggtgcgtctccgcgggcgcgcggggccacgggactccgcgccgccacggctaacgcccacgcctccccgcaggtcaccatctgggaggcgctaaccaacagcaagccaggcacccaccccatgtcctacgagggtcgccgacaggacaggtcagtgcccgctgggccggagagaatcctccggagaggatcctgtctcccctaagccaggacacagccggagaacccgcggggccctcggcagggaccctcctggtatcgggatggcttctgccaccactcctgcctccgaggcggcaggcaggggtcagggatccaggcttcaccgcggagttcagactctccccaggcattgacggggagaacttggtagggtctgggctccgccacgaccaggtgggggccaggacgccgcgggactgaccgcctccactagagggtggtggccgcgggccgccctggagcctccacgccgtgtcccggccccggccggtgggtgggtgcgcccgggagcccgcgacattccttccccacccccaggagcgccccgcccacgccgcagcgccagcctgcgcccccggcgtcagtgcccagccctcggcccagctcagggccaggttccggcggccacgtgttccggagctacgacgagcagctgcggctggcgatggaactgtcggcgcaggagcaggaggagaggcggcggcgcgcgcgccaggaggaggaggagctggagcgcatcctgaggctctcactgaccgagcagtagcgccccctgccgggaccctcgccagcgccacgcgcgccacgcccagggccaggagccagacaaaccccggcctgcgcgcctgcagagcggcggctggagactggagccaccgcctcgcgggtgcagcagcacagcaggcacggttcggggagggattcggcatggccgcggggtaccttcccaggccagggccctggaggcaactggcacggcctggtccccctgctttgctgtattctgattccccaacccgctcccctgggctcagatctgtcctgtcctagggcggagccaggcggtcctgagggggagatgaatccttagaggagcgctgtccctatcccttgctccttctggccggtccgcatttctgttcactaaccccactccaggacactgcccctgaagcctttgcatctctgctcttcactcctggggggcagctgagctccccgcgtgctgtgtcactgctttgttccagacacaaaccagcacgtctagggcccagcccctcccccaccccggcatttcagcgtcaagtgcacttagcggggtacccggctcccccagcccccacacccgtcctgggtctcagggtggttccagcttctccttgggcagccagaagttggagtcccatcccccaaggcacatttttttttttttttttttgtgatcagggagtgtgtccaacgtagccccctggcctgtgcaagccctgactccctcatggtgcctcggagagtggggagcatattgggctggggtaagcactagacccaagtagactggacacaaagggctcgcccagggccctggcgccacccccaccccttcccaccagctgctgctagcctctgtggttgtacatcccacttgcccccacacggagactgactctaaaacccttcatccaatggtgctaacccccggctctcccctgccccacctcacccacccagagaagcacagaccccgccaggggcaggggcccaccgcacacccttgtcccgggcctgtctgggactggccttcccggctcagccagtgaggctcagaagggacacaaagagggatggaagaaaagaacaaagagaaactgttcctcccacccccttccctgatgccaggggcaccagactgattctgaggcacaaataaaagaggcttcataccggaggcttttgctacctaactttacttggggggaacgcctacggtgtgggttggggtccttctgaacctcagagtggagagagctctagggtaagaggctgcctgatggaccctgagcccaggagtgcatcgccaggtctcccaggagcctgggggtagcatttgcagaggctgggggtctcgttcccctcactcccacccatgcaggaggcacagactgaacgcttagtaaaatatttcattcagtacgtcttgtttttctgagagaggcaacggcagagggttgggggcagtgtgtgtgtatttgtgatgaacctaactcctcatgccagttctctcgagatttcttcgcgggggctgccgcgaggaagcagccctcgcccctgtcggtggaaagaaggaagagagttctctaccacagaccgctgtgggtgtagccactgggtccggctctgcagcaaacgggttgtgtatgtgtctgcagaactggggtgacgcccatctggtttaccgctcagggtgatggaatccagtgagctgattaggagaagcgctgtcattttccccagcctgggggtacccatcaaatcgccacccgtttgaggtcaagctcaggctccaataaccccaagcatcacgctaatactaagcactttccctgccctgggcggaggacaaagggggacaccacctcgccgtgcagcaccattgctgagccccccaggttaccccaggcctccctaggccagctccagccgagtcccagacgaggctcgcagtccagcctccgctggagcgacgtgggtctcccctaagctccaagagttctggtctcccgcgaggggcggagttccctccccagtcccgcccccgggcccagcccaagaaggcggggtccggagttcgggactaaaagccggggcggggccgagcttgtgcgccccgccccgctccgcctgcctggcgcgcggggctagtccgtgccgtccaccagctcgcacagcatgttctccagagccgtgatgcgctgctcctgggcctgcacccgctcgcggagggccttgatctcttccagcagcgtctccagggtgtgctgctgctggggcggaggacagagaggccgtgtcgtataggggcggttgggggagatgtagattgggccagagtgcagcagggccgatcttaccgacaagggggcgtcgctggccgactggctgcggcgggggccggagggcgggcgcacgtccaggatgttgcgcttcgtgacccggagctcgcggtgcttggggggcacatagccgtccctcagcgaaatgagcacgggttcggcgtcctggccggatagccattcgtccgcttctagggccggctccgggcctggcgtatccgggtacagatcgtcctggaagaggtctgactgcgggggtgggtggacaggaggacttgcgtgagagggtgcggggcttgctccgctcccttccgcctcgtagccctgcccaacccttctcccggcccctcaccttgcggggcacagtcatgatgataggttcacactttctttcgtgtagcttgtagaacctataagggagcagggttcagcaccctcgcagacttccacgtccttaacttctcctgtctaagaccaagggggttggaggccaacacttgctcagcgcctaccatgcatattgcacattacacacattattggttctgcaataaaacaccctgatggtgtgttcaccatcatcttatagatgaggaaactgaagttgagaatgtaaggctagtgagcggtgggtctggcactgaaacagagctgtcttatccccccgccccgcttttccaaagcactgcattactggggaagccccgtggctaggacccgacatgagtgggggacagaggcgggtaggtgttcaggaggggccaaggctgctgaccgggcgatctcacacttgctgacatccagtccccttttgggcatgaaacccatgccccgctgcggctctttgctgctgaacgtgttcaggtagtgcacgaaaggcggctcgtcggtaatctcaaagtaccgaatgctgctgtcgccctgcaaaatcagtcggttcaggggcgcgcccggacaaggccctccacatctccatccagtgccctgttctccctgcccggccgtgagcaccttgccacacaggtagacgatgctggagtcgggatcgtaaaagggcaataggaccccgttgcttgtgtccatctcctgcagtgccactggctcctcgaagttgttctgcccgagcacaggaggcgtgaccagccctgccccaccctcccgtgctacttcgggacccccagaagcccctttacgcttcctggccttcccaaaccctatgccccaaacctctagtgaccagagttgcaggcccctcccctgggcacatctctcctcctcccctgcgcacatagctcctcctcccctgcacatatacccgctgcgcgccgcatgcagtcacagcaaaccacccccagggactcggcatcaccaggtgggggcgccagcgcaggatccttcacgcgacgcagcaaaactgggcagaggggtgggtgtgagaatggcaggcgctgcagaggtggcagcagccttcagtcctgtccaggtgggcatgccctgcgggtggggggcgcctggccactctcccgtgatgccagtccccgaggcacacaccccaagcctccagctgcgttaccgggtcccacaggcccagctctcgctggctcatgcgggtgaagcccgtggtgaagatatggccctggcgcgtgaagacggcccgcatgggcctcatcccctcgtgggccgcaaacctctcctggggggagggggagacagggagggacatcacccagctgcctgccctgaggagcatggagggatgagcaaccagcttgctgacttgggtgtccggggtggaggagcggatgcggggaagagacaaatggggcctaagcactcagcttcctgcggggccacgtctggcccctgacctggagagcatccgggcctggagagagcaggaggcacgcggctctcagccgatcccgaacccttaagcgcgctcaaaggccgatccctagagcaggggtgtctgctggctccccggagtcgcagcgaggcttttcccgaatgggagctccccgctccgctctggcctcttgggcgccagccacagcccgggaaggcgctcccggcagacccagagaaggagcgagctagcgcgcccggcgcggcctggcctaccgggtcccagagcgcgagttgccgctcactcatcctgctgaagccggtgctgagcagcttcccgtctgcggtgaagacagcccgcagcgggcgggcgccctcgtgaggccgggcttgctcctgctcgccgggttagtgggttagagcgccccggcgccagccccgaccgctctcggcgcgcttgctccacgcagacatgcacgcggcccacgcacccgcaccccaggttagacttgaggctggcgaggccagggccgccgccctcccagggcatccggctgggataagcaacgcgcgagggttgccccatcccccgcccagcgggtccacaaggagaaagggccagccctcgagccagtgtcaggccccagaccctggaagatgcgtctgggtgccggctgagaggagaggggtccaggagctcaggtttcatgcaggttctggtgggaggatggagtttccagcttctcccctcctcaatcccaaagcgaggagcccttctctgagcttctgagatgcaagggaggggagggaacaggagccgggcagagaattgcaggctgggggcttacttagggcagagacctgtggttgcagagacgggggaagggggctagtctctggagcagggatgcgacaggtgaaagccgggaccaggggctctgataatggtgggtacaagggtgctgacagctggccactggtcaaggggttctggggagtggccaggccaggcactcaccgccaccacttggccttttctggggtcaatgatgcgcaaggtcttgtccttgcaggtggtggctagcaggctaccgttgctgttccagcacacactgtggatgacgtctgggtgcatatcatccaggctcagcagcacctccccggtgcccacattccagatgatgatcacattgtcaccacctgcccagagtggccaggcatggtcacctgggtcccacctttgccaccacccacccatctatgggggacccctccttagcccccagacctgcactgagcaggacattcctggcagtagggtgccaggagaggatgcccacacgcttggagtggccctcaagtgtgatgataggttccgtaatgttgcgcatgggggtatagtctggaatctgccacacctgggtaggaagaaaaggtatatggtgggtggaatgaggagccaccctgtccctccactccttccctacctttttttttaaccctactggctctcttgagtggtaagggtcaaatacagggcaagatgtggtggtgcatgcctagaacagaagcagctgggagccaggagggggcactgccagctctccagagacctcccattcactccagcagggagacttcagagcactgccctgctgctctccaggcaccaagttggccatggctataattagtcctaagcagtgcatcctgggagggggtgggcatgtagctaaaaatagtccaggagctgggcagggcagggccctgggacccagcacctcccttattaccacccttagcaccttccccagcacaggtgaggcagccttccctgctcccctgctcaactgcccagcagtagccacctggctcctaccatgatggtggtgtcgtctgaggcactggcgataacgttgtcattgtgtggacaccagtcaatatccagcacaggggcagtgtgcccagtgaccagtgggtagttcttatccactcgccctgtctgaggggttggagaagaagatgtggggctactctcctgtgtgttttttggggagtgggtagcagatctgcttacatctcgattccttattacctattttctctttgcagatccctctctgcacttctaaccccatccagtccacttcctgcactttactgaaggcagagttgaaataatttaatattagggactgtgacacagagaggtaagatggcctcatcaaggacacacaacaagatacttgtagagctgagatttgaactttccagcccagtgctcttccaaagacacctacttggaggaggctgttcttcagcctgttctcctattgaagtgtctgtgggaatctcctggtggaagaggtcaaggtgagataatagtgtagtgctggacagccctttcctggcctcccttggcagatctcttccttgtgaaccacttttaccttggaaccacaagcagcaagcagtcctggtgcctactatccccaaatgggagctgggggcccatctattttttggtcttcacaggctgcttgtgggggttctgagacctctgcaggggcagacactggtccagaccaggcagcgggggagagggtggctatgtggtactgaaagagcagacatattgggggaggaggcagctccggctgaaatttgagccctggggctgtgtcccaggatgatgtctgcattgtctggggtgagtcactggctttttcaggcctcttcctgaccccgccacctgtggagcctaccctaacaaggtgtaggggccagaatccaggtcaaggtcataccttgggggttgggggagagtcatccttgggatgtggatggtcaaggggcttaaggttatgaagctaacgtggtagtcattgcctggtccccatcctgagggtagggagggctctggctttatgtgtcatgtcccccttcctttccgttccctttctttctacttcactgcaagtgtccttggaggtaaccagggactctttggatagagcctgaccctgtcctcagtttgctgctctgggatgtgacttaatcaaatggtcatcttgggctagggaggaggttctccacacccaaaacatgaggggatgcggcattaggagaggcagtgatggaatctggccaggcttggctgtgctgtgtcccaaccatctccatcacccggctcccctcctggtccctgctgggaatggggtggtgcatggagaggtgggagggctagggagtgggagtaagccaccctgatgttagggtggggtggggtggcctcccctctggtccttgagggcttggggaatagggaggagccaatccacacagatgcttctcctgactatggaatggaactaggtgagaacaaaggctcaggagttcccaggggccccagctagtgtcctcccacttgcttcctttccctgatccctcaccttggccagaggcaggacgatgaaggcacccccgcctccagcctccacaataatggccaggaatttggggttgacggcacagaaggagctgtcccatgtgaccttggacacacggatgtcctcgtaggcctggtcggcctttgctgcctgcccaaacacatggcggaacttgctttgccgaaccacacgtctgctcatagctgcaggcagagaggtaggatctcagtgcccagaaatgcctttggtccttagtcctgtgagctgcgggagggaggaggagtggaggggtggctgatgagaagggttatgtggtcaggagtcaggtataaatccatatagtgtctggtcctagaagcagggagctttcttcaaggtggtcaaagtatgggaaagttattttgctgtgtaaaatgctgtttaatgtaagtggctaggatttggggcctgaattctccacagagacccaggctgaggggattgtggagcctaacagactgaaagctttctggacgttggaatgtttttgggaggagcctcaatgccacactgcctgcaccccccgcccccaccaccgccagccttgatgagcatctcttcacggacgtggttgtagctcccagaggcaccctgtccagaagcagaagacttgaccattggatcttggcttaaagccaggtatggggccaagactgcagccaccacaggataccgaactcgcatctctggaatagttcaggcagatggggttttgccttttcctaaaattttgccaagggggaagttcctcctgtccaccaatctgagtcctttctgctactgttttcatcccatgccttgtggggggacgggtggcagcacagagtgaggtggatccctcttctcccactcctttctgcactggcttctccaggaagccctgatcatggtcttctggcttttgcctaccataggcttgtccggtttctcctctgggtcctctgccctggttgggccttcttcctagtgaactcttctaggggtggggtcttcaaccccatcctccacccctgcccccgccacggccaagccagatttgcaggggtggggagggtgaggtgccttttctccagctagggtctccctagaggacacactgagcactcccaaagccccagccagtggctcctgccccaccccagccccagcatccgtgtgcccttcaaggcgcgtctgcggccccgagcctgaggcccggcctccctgcacccttcttcagcctgctgccctgacactgcgttcttgcgagacgaggtgtctgcgccctccgggagcgctggctgctgtccggccaaatatagacaccacgtcctccccgcccgaaaccgaatttggcggcgcggggggaggaggcgcagacctctgcccctcagggaccccgcccgctccgctggctgcggtgacggccgggtgtggggggctgggtacctggtcctgagcgggctgcggggcgctcacgctgcgaatcctctgcggaaggggcccgagtgcgtagggggccgaggaaggcttcagggcgaaggagccacctctccgggtgtctgtagtatctgggacccgggtgtccagctccgcactctggccgatcctgcggctctctagagcccggcgccgctgcagccccagctgccgctgccatcaacctaagagggcggggctagcataggggcggggccagagcccaagttgccccgccccctccagcggcgggaaagtcgagcgaccccgactcccctcccagcttccgccggcctcggagaaccatcgaaaataaatgtgcagctgtgtgctaggtgcgcacgctgcttccctccctccatgactcccgggtaggctggggaggctcgggttcgcagacctagagcaggacgcttggagagggaacgggcgagggggcgtgcgcccctagagcgggcagccgagggagaccaggtgcctccacccgcattccagcctcaatcgcgctcccaatttagctgtcccgatcggccgggactgcgggactgcacttccaggcctccctgggggaaagaggccctagagaatgaggacccaggctgatcctgatgtagggcaagtgagagggcacccgacacagggttgtgaatgttagttattgttatgaatggcaatagcgatcatttgagaaacctaaaatgctggctgtgtgctaggcatttcaccccattagatgagattccatggagcagggcaggaagcagctgaaagaacaaggggaggaccgagtgtaaagtgaacccaccttgacactccctcccctcccagatgcagggggaagaggctagcaccggtctctagtcacattttaggggtcagagaagccaactcagaggccagactcctaatgttttctgggccttgtttgaattggcgcccgactgtgttccaggtaagcttcccccgtctcccccaatattcacagaactgaatgttgaccgaggtcaaggagattaaagataacctgatcaaaatacagccagtgaagaccagccagtcccgtagctccagtctacccagtgtctgcacattgcctggatttcttcccttggatcataagggcatctggggccagttattacttcccaccctccagggcacacctgggagtgagtgaatggaacacagccttctgaagggcaggaaccagcactggggaggaaagggagggaaggtggtagaaaccatgaagggcccacgaggctcctttgtttctcaggaagagtccaggtggcttgtagggacagaatcaaatcaagagtcagtggcttgtaggggaacagaataaaaaactgttacgagtgctccagaaataactcctggcgtaggggtgctggggcagggtatgagggtatgtgagtcatctctcttttacctaaagattccaggcacatgattaggaggaaaatacctgagtgactcagttgctcctttacaacaataacccatgcttatgtgctaggcactggcactaagggctttatacgtattaatttcatactcttaacaatcctctaggctggtcgcgggtggctaacgcctgtaatcccagcactttgggaggctgaggcaggtggatcacctgaggtcaggagttcgagaccagcctggccaacatggcaaaaccccatctctactaaaaatacaaaaatttgccaggtgtggtgatgcacacctgtaatcccagctactcaggaggctgagacacgagaattgcttgaacctaggaggcagaggttgcagtgagctgagatcatgccactgccctccagcctgggtgacagaatgagactctgtctcaaataaaacacacgcacaaaaaaccaaaaaacaatcctctaaggtgggtactgttgttatccctatttaacagttgaggaaatggagccacaaagaggttaggtggcttacccatcacaacctcaactggtagttgatgtagctatgattcttacccacgtggtctggcatctggttcttgcttttcagcagcatgcatttctgtctctccctgaaggacagtgccactttatctcacaagtgctgagctaaaacgtaactgagagtttatactgtgtggcacagaggaaaggatgcctggaatgaattaaaaaactggttccagtcctggctcaatcgccatatttttacagctctctgaacaggattgggtcagattctttccaactctgcaccactccttagcagagtagggattttatgtgctgcctcctctgaagtggcatctcccctacccccaccctccttctctttaaagagaacaggagactcccttctagagggaagcgcttgggactaggaagcaggaatccttcaatgcgtgctcccttcagttccatcatctaggaagagcagtgctttctgggtacagggattcagatatttgcttgggcctggcgtagctcagccctgccctctagccttcttctggctgccaaggcctgacagagctgtgagtgggcagagttaaggcaggaagaaccaatcagggagagaagctacttgggcttcgtgcctcccttttgaactgttagctctgaacggcaatccatagaagacagccatggatttcatcttttaggaagccattttctggatgaggtagctcgcaacttagccatgatttggtccatctgctttggctagaaaaccaagactgaacttatctagattggtcagggatcccagggatccttagaatattttgtgaaagaccttaccttcaccgtcatgcactccagctaaagaccagcactgtgcccctcccacttgatatggatgattcagaatgaagcaggctgactttagttcaaggcagtgatttttttttttgaggggggcggggacttcaaattttgttagcaattgggaactggaaactgagctctccctagatggtagtcctgccttgtatgtgatgaatggcaccactaaatatctcatgatgttcatgtcccatttctagacatttttcagtgggctgaggtgtttcatttatttctggggactcagctctctcttcagggtgacatgactgggatcaatcattgaaaactactggtgttcactgtgtttcctcttctgactctcccaccttctccagcacctccctcctttgttgcatctgatgaagtacacgtttcatcttcaaaataaaaatttattcaatctgtaacaagaacattgaatctgcacatttgcgcacaagttcacatttaaaaacagtggagcatatctgtaataaaaaaatctatgatacaagtggaacatcccaaccaccaggaagattaaggaaggagatgagaccactctatattctgcttcaaatgcctcaaaaatgtcccagagattccagggagcacctgctttaataaaacatgagcataaaagtttggggtggcttggggcaaaggtaacagtcagaggagagtcttctggacttgttttccatgttagaacaagtcctacaaaacaaagcagaaagaaaaaaaaaaaaaaagaaaagtaaaggcacctttagatatgccaagcaaaccaaaatccaacagaacataaaaatcaaacatttccctgtgggcttactgattgggaagcacttcagggccagttacccagtttttagtttgggtattagctctgcatgtgtacacaggacgctgccaccagcattgctttgaggacacagacggcagcaccagtcaaatgcctcttaagggatcttcaaggtgattaaggatgattccagtttagaaatcctatcctagacctctggggcactgagaaaatgaggctggttatcttctcatagcaggagccagggccagtcaccctccatttccaggctggaaaagtacagaagcaccttgcaatagctcttcatgacgtcaagggaccccacaccctgggagaagggttaggagtgtgcagcttcctgctttggtggcaggccttttcctaatatgggtgtcagaggagttgaggcagcaaatatgcttgtgtctaatacatgccttgatcttttagtttggaagggaaaacaaagtccaagatgcttttaagttggattgatgctgaaacagctaaaatttcatcttatccaccatcaaaaagcaaaacaaaattaaacaaaatgacactagccattcaccattacaaccatcactataagacacaccatcactgaggaaatgacaactatttccatagagagtgctggatgggagggcaggacacagacggaagtcagcttcagcgtatacccacttactcacaagggctgaccatgatggccctgctctgcatgaggactcacaggacagccagggcactgatgcctgcaggactgcatggccgacaagatgatgcacattttaatattcaaaatgtaaacaaagtatccacaaatagtccaaaaaagccaaagaatggctttacttaaaaatttttaaatgcccttaaaagtgactttttgcataatgctttcttaaaaaaagaactctcacaaaaacatttttaccaaacatgcctagatcacttcagaactgaaatcctcagatgaaacaggtgaacacttctgtgacctgctacatctcagaagcttctcataggaagctttgagtttacccaacagcatctgtctggggcctgtgagcagagtacctcagagcctgaggcactgagatcttcaggctgtccttggagctctgggtagtttgcaaaatgagaaagaggaactatcagtagggataaagacacagaacaaggaaatccataaccctgtctcaagcctcctcagaaccaggaaaatactaaagatcctgaagagactaagatgataggaatgatcccaaacatttagaatctgaaaggcaactaaaatgaggagagatgaatattacggtactatagtactacatgtctactacagtatccattagtcctgggtgtctccaaaaatcaagaaagggttggggtttccctttctactgaccaggttcagctcaagttctgtatgctcctggggcttttaccccatacaccaaaacatcaactgtttttatatatgtacatatgtgtacacatgcacatacactcctccaaaataagtgagagtctatggtggtttaaaaagagagagagagagaggagagagagagaggcaggcaggcactgggcaagagtcaaagtttttcctattcatctttgccagtctatcaaatctgctgcttcaggtcaggtcatgaacaaaagaaaagggaaagatgccactggagattataaaagtctgaagagaagacagtctggaaagtccttgacagttcactgcgcacctcccctggacactgctcagctatgtaaataacccaggaacacccaattctgggagtctgaaaaggctggcacaaactccttggcatggttgaatgacagatattctgtagaagatgtttatttaggcaggtaaattaaatgataaaaaaagtaattataaaaaggcagaaagactttcctctgctcttgaaaattttttttccccacagtattagtgggttttgtcccatctttgttgttatttaatgcagtgagtgaacattaaacacagtggaggggagaagagggaacagtccaaaactttggtcctgcttgtacctcttagtgtgtgggatgtcatcatcgtaaggggttaccacaagtggatgccactctcttaacttccaggcaaaccctctccccaccctgccataagttcctgcccttccccatcatattggtggtggaactgcttcaagaaggcagggtattctacatggaagagctctggaaatccataaccctgtctcaagcctcctcacattggttcataccacctaacaaaacactttacaacacacaaatatccaggaatcacaaaactgagtggatgagatacttgaacattcaaggagactactgagcaacagcacagggtacacataatcactgcaccatagagacgcttttagcaagtggtttctgtccaacctgcttcctggcagggatgtcagacccagccttggcttccacacaacttcacagctcctcttaagacccagtggccccagtctaccttttctgcatcttttgggtcgccctgccatctgcccccaccaaactctggcctctgacatcatgctgacagtctgtgcatttgtattttcctcagtgctgtgataagccaaaaacctgtctccagtctatactcagtcaatcctcagtaacgtggacatcaacgaaagcaaatctgcaagcctcttcagtttcaatgagatgcagaggtgtttcatgctagactaaatctgttttctgtaagaagctacaagaggcttgtttatgacaggcgctgctgcgttaaggatctccacaacagtagcaaaacgacagcatcctaaatggagtcactgtgggcacttgcccctggctgaggcctcccctgtggccttcagcctctactaggagcttccactctgggcaactcacatatacttcctggctgtggttgagatactggcaaacaatgttctgggatttcagtctcacagagaaatcagctttcagtcacgctgtgacctaatgggagcctttaggggtgtctctgaggaaaaagttactaatgcataatttggcaggagctggtgattggaagtctccatttaaacaactacagccaccatcaacatattgtacagattcctatcaacacccaacactttcatttctggtgtctgtgttttccagttgcaactctactccttcttaaaaagaataaatcaaaattaccctacaacatgaacaagacactaagacagtgacaatattatgtacataaatactgtgtacaaactttagagaaatgacaaaccttccaggaaaaggaaaaaaaagtgttaacagtgataataccaaaaataaaacgttgcattcaatggatgttaaacatatgtaacaattcaaatataatctatgaaatttaaaaaaataggcagcatggggacaacagcatggggaaggaaaataaactggaagaaaatatggccattaaactcagaaggcccaaagaattattcaagtaatggaagggttaaaaccctacatacatattcattttacaagaacacactgactttcgattgctgcttttcaaacatgtcactgttgttttcagttgggaggacactgcagagcacatttttctggcagggagagccaagatgcccatctgtgtggatcccaccaacccagcagtttctgggcagcagcctctccacccccaactttatgtcttcctcctcttatcatgctttcctctacagaagaccacttggatttcatttggggtcctgttttaatttcaaaaataattttcttgggaaaaaaactatatgataaatttgcagagccggccattatcatgtcttactgtaacgatacactctggaacaccggaagaccctcttttaaagcaaagcggaacctgcctccttcaggaactctaaagggctgcggctggatgaaggctgagagccctctgacttctggctgacctttagcccattcgatgcctcaggtctggaaaccaaaccatcatcacaaaggcaggggaacatctccaatccccagctttatctccacccctccgaatctgcttccttccctcaattaagaaaccatgccttttctcagagggcaaaatgagaagcaggtggcagctgactgaaaaacagcaatttgcctttgataaaggtgttctctgaaaatgacttttttgaggtttgatttttttaaataaaaaatgataaacggtcttgccatccagatcaatctctctttccccttacatatacacacacatacacactgaaaaacacccaaaccctgcatgcaccagaaacagtaaaatgaccaaaatattataaaattaaccaataaagtgcatgttccttacatattacacctgccccttttacaaacatttcttctagaaagtcacatgtgtaggctcagaatcacatggtattatagaaggggttggttgtccgttttttgtcatttgcctttttcagtctcctaagggggtgagttctgccgtgttgctgacggggtgccacggccagccctggagctgggcatgcacactgcagtccctgggtctgtagcacgggaaggcctccttcagaactagtcaattcaagtcctgccctggggagcaaatactgctgactagaaccaaattctttggcatactgcacaaggggcctctccactggcttgctctgcacaatacactctgttgttgtgagttgttctacaaaagacttggtgggctctgggttgtggggggcacctgggttttctagggactcttggtcctccatcgcgtgcatgcctgagtctgttctgaggaaaggctgaagcagtttgagatgaggggattcacaggaggcaggctccctctctggtaagcagtctttacagaggtccaagtaacctaatttggcgagagaagctgagcgcctcatttgggatggtttggtgagccctgcctggaaaaccactcgagactcgatttctttagcacgctccttcaccacaccggggctgtggctgagactctttatgttttcactactagagctatgtgggagtcgacaggctacaggcaatgggtccattttctcctgtaactccccagtgttgtcaccaagtttgctaattaaacttaggtctgcgctacttagctgggagtccttatatggcacctcactgccactggagagagggctctcctgactttcttcccagctaacctgttctgcagagggctcatctgtagtgctgctctgctctgtgaagccctccaggtgaaccatagtctggggatgcaggtaatccaaactggcagacagtaaatgggttgtatgactgacaaaaggtgctgctgtctccagggctgtggacaggctgctgcctctgtcttcagggctactcaggatggaggttggatggtcagtgggtctgttgtgctcaggggaggaagaatgaggcagaggtagcacttgggggtgcagagaaacctggttggggtccagagtcctgtttagattttcatccagtgtgcagagcacagtgacagatttttccatgttcactttcctcagcccttgctctccgctcttctcactggtggctatttcactccctggcccagtgtgattgggtgatgtaactatgtgggtatattcaatgatttctaccctcttgggaaggggaagagggactgcttgtgtttcagactcctggtatggaatcacagtcctcagatccttcaggactccttcctgctgtgttccagtatctgaccctgggccctcctgaggatctggcaagtggtcaaactccagcaccctgggagctggaacagtggcattctgctcagaatgggacagtgagccagcctcagacccactgtatttccctttgcctttgctcatttctggttccttgaggacaaatgaatgttctgggggggcttcatcacttttcccttttggtgctaggtctgccacagaagaatcattctttgaattcttacgagtggacaatgaggtacatgttggggcagcaccatgatgctcttgctcctgccgtaagcgctcttcgaactccaaggtggctcgcctcacagacccagggtaccacttggcacctgggtgcatccctgagccctggagctcttgttccccctcagctggttccccttcttccaagtctgctatagatgagtgtgtggttaggcagccttctgggttgcacatccctgagtctttggctagttcaggctgggctgtgcaggagtcctcatcttgctccatatgtccaggtttgttctctggagtctgggccctctcaaggagcagctcatggatgctgttcttctttggtgtatggcatgggttgggtaagatgtctcctttcagttgaatctgcccaactccttgactgatggactcaatttcagtgacaatttctttgactgaaattgcattttccgagtgagactgcatgaagatgtctgggctgaccagttctgaaattgcctaagaagagaaagtagtgagaagattatggcaaactgtagtctaattgaaaatgctggattttctgcttattaatcctctgatccaggacaacctatctgactaagagaatacaaatcatggagtgcctgggaccacactctgcccatctgttttgtcagactacaagaaaaaactggattcatcaaggctagacataacatttgttatagcttgtgttactctctactaaactttctgttctgtttactcaagcagaattccaatccaatactttgctcccaaatgaacagcaaatatttttggaggctcctataatctatattttcctaagactatgagcctccaggttcaggccatactatagtaaatgaaacctttcccccgtggcctatcaacttctagtttgatcctaacctatctgagggaaagagttccatttaagggctaagatatgtccttagatatgtcccagtgatagagcaagatggacgaggctatcacctgatgtctgatttggagactcactgctctctttcactcctctgtcttgctagctttcacccaaatcctctcactgcttcccctagcagcaacatcccagtacctacaagcagggagaatgcactgtctgactacataatctctaagtttcacatggttccttctgggaaaggtttacttggcttacacagccacatgccttagcaaacttagaaaccataactctctaatattttactattttaccagctataaattcccaggtggatttagaacaaggccaaagaatactgaccaatgcaaaatcaggtcctactgtaaaaaaaacaaaagaatatcaaaatctgggaatagcccttggacacctcttaaagtagtatcattatgagtatcaatctagttaacatttttataagccttcaaagtatatttccctggaactgttctggtttttctccctcaaaagagtcagagttagtacaatctaacaaggtcagtaatgcctttgggggaaatgtgccatgacatcaggcagaggcaaacttgccatgaatgggagagaagccacagtgggcccagtatgtgcatgggccatggagggagggctcatatgaccagggactttgcagaaaggctatttctgtcagtgctgctacagtcaatggtccaaaggagagcacaagcatcctgccttctcagtagaaaggaaacaggggcacagctttgcatgtggtgaaaagacaaaagcagagtcaagaatcacagtggggtagttaaggagagagaacaaatcgttaacggacaaagcggtaaatataagcagacagacatcaggagaggcaaagaatctatgactagctccactaatcattaggtgaagtttggtatgttagagtcaatctgtcacagtttatttcccaactactgtattgtaatgatttaagacactgctgtatataagatgtcagaagtgtcaaaatatgagtatgagtcttagaattgatgcgatatagtgattcttttcctggtttgagatggcttgtaagagctcctatgccacaaagaagaatcttaggattctgtctgctggcaaattcatttccttttgattattattattattattattattttttgagacggagtctcgctctgttgccaggctggagtgcagtggcatgatctcagctcactgcaacctccacctcccgggttcaagcgattctcctgcctcagcctcccaggtagctgggactacaggtgcgcgccaccacgcccagctcatttttgtatttttagtagagatggggtttcaccatgttggccaggatggtcttgatctcttgacctcgtgatctggctgcctcagcctcccaaagtgctgggattacaggcgtgagccactgagcctggccttccccttgattcttgagtaccacagcattggagatgaagaagtcaggtacattattattatgatattgtttgagacagtcacactctgtcatccaagctggagtacagtggcacgacctcggctcactgcaatctctgtctcctaggttcaagtgattctcctgcctcagcctcctgagtagctgggattataggcatgcgccaccacaccccagctaatttttgtattttttgtagagacagggtttcaccatgttggtcagtctggtctcgaactcctgaccttgtgatccgcccgccttggcctcccaaagcactgggattacaggcgtgagccaccgcgcccggccagcacattattaatagcaggaactcagcatgggaagcagttgctactgtaacaactattcacacatgtctagtctttgacttttctgagacaataagaatttcccaaacaaatctatcttctcagagacacagctctcactcaggcagcatctgagtccctggcatttttttgttaagatctgatattaactgcgtatctttggacttctttttttttttgagacaagagtcttgctctgtcgcccaggctggagtgcagtggcacaatctcggctcactgcaagctccgcctcctgggttcacaccattctcctgcctcagcctcccgagtagctgggactacaggcgccgcccgccaccacacctggctaattttttgtattttttagtagagacggggtttcaccgtgttagccaggatggtttcgatctcctgaccttgtgatccgcccgccttggcctcccaaagtgctgggattacaggtgtgagccaccgcgcctggtcatctttggacttctcgttgttcagccaggacacttgtttttggctcactccttcctctgtcatcccctcttagaagtgcttccaatgacaccagaaaggtaaattcccaaaaggcaaattatttaaaaaatatttaaaccctaagttttcaaagaaaacctcagccagactctccatcaaaaacaaacataacataatcccaaataatttacctttgaagagaacttcattaggcggaaaactataaagacagtttttacctttgactgttcctcatccattgaagattcttctgatgcatggggagtattactcaaagagctgcttctctggtcatcagctgtcactttggaaggggctacttctaccactgacagtcgacagctctcattccttcctccacccagttcctccatccttgaatgggaaaaagatcgtgaccgggtttcttgggagagctccacaaacttctctagggcactaaaaaagtcaatgcgatctgtactgaaatctgagatttcagtctggcaactgggttgggggcttggtgactcaggatcaggggacatgggggggtctttcagtggagatgtcaattcttccataggcagtaggtggacattcatgtctgctttcagtgcatctgtctccaaatcttccactgttaagtctggaaacttgttggccatttctgggacatgtccaggctgaattaaggctttggatgcatggcaattgtcaagaggaaattttgattcattcagacaacaccctgatgagcatccattgatgtcatttaagtttaattcatcctcaatctgtccagcatgaaattccctagaagtaaactccaagcagatcattctttctttggtacacaggcctttctgatttgcatcttgtgggaccatatgttccacaaagacaggaggtatgggtgggtgactctccatggtcttcacctcagcaatctggtctgctgaggtggtgatatccttcttgttgagttctagcccaggtttgcagatgggttcgtggtggtctgagaggtcactatctgaatgagatctccatagtttgttatgccgctgtttgctgtggaggacatacacaggaagtatcttaatctggtttgtaaagataatcaacaccctcccaggaaaacactcccagataaatcttaacttgtaaaaatgctttgttattgctcaatggaactaggcaataaacgtttgaaaagacaatttaatagcaaaaaacaaagcaaaacaacaacaaatgagtgtgagttttttttacctatcagtctgacaggaattaaaatggttggtaacagccagtgttgatgatggtatggctaaacaagccctctcatatactggtaggaggaatgtgaattcagaatttttgttttttgtttttttcagagtctcgctttgttgcctaggctgcagtgcagcggcttactgcaatctctgcctcccaggttcaagcaattctcccacctcagcctcccgagtagctgggattacaggaacatgccaccatgcctggctaatttttgtatttttagtagagatggggtttcgccatgttgaccaggctggtcttgaacttctgacctcgagtgatatgcccacattggccccccaccacacccagctgaactgtagattttaaagactgaaatctggcaatagctctccaaatttaaccctttaaccaacaattcttccttaatacatttttcttggaggaatactactacaagtacacacagatatccatatggccaggtaaggtggctcacgcctgtaatctcagcacttcatgggaggccgaggcgggcagatcgcttgagcccagaagttcgagaccagcctgggcaacatggtaaaactccatctgtacaaaaatataaaaaattatccaggtgtggtggcgtatgactgtagtcttagctactcagggggctgaggtgggaggattgcttgaacccaggagggtgaggatgcagtgagctgagattgtgccactgcacccagcctgggtgactgagtgatcccttgtctcaaaaaaaaaataaaaaataaaaataaagaaagatatatacagatatttactggccggctgccgtggctcatgcctgtaatcctagcactttgggaggctaaggcgggcggatcgcttgaggtcaggagttcgagaccagcctggccaacatggtgaaaccccgtctctactaaaaatacaaaaattagctgggagtggtagcgggcacctgtaatcccagctactcgggaggctgagacaggagaactccttgaacccgggaggcagaggttgcagtgggccgagattgcaccaatgcactccagcctgggtgacacagcgagactccatctcaaataaacaaacaaataaacaaaaaaagatatttactatgacactatttgtgatactaaaagatgagacaccaaacaacaacaaaaaaggatttacattataatccatacaactatatgctgtggagctgttaaaagctgtcaggtctacagaaatcttctgtggtaagaaaaaaaaaaaactaaaaggaaaaaaaaaacctgtcaggtattttagtggaatgatatacaaggtatactattcagtaaaaaaaaaaacctcaaacacatttgaaattagtgtctatgttagaataatataggaaaaaatctggaggaacatcaccaaactgataatagtgattctttcaagaaaggtagaaatacttctggggaaggcttttactttctatattttacacacacacacacacacacacacacacacacacacacacacacacacacacagagacagggtatcacactgccaccaggctggagtgcagtgaaacgatcagagctcactgcagcctcaacctcctgggctcaggtgattctcctgcctcagcctccttttagtagtagctgggactacaggtgtttgccaccacgcctggctgatttttttattttttatttttgtggagatgggggtctcactatgttgcccaggctggtcttgaactcctgggttcaagtgatcctcctgccttggcctcagggattattggagtgagccaccaagcctggcctctatatttttacaatttttgaatttaaaaaatgggcatgtttaaaaattataatcagaaaaaaacctactaaaatcaaaacatacaagtaacacaaagggaatactctgttggaacctattaccaagtcctcataactaggatgaagaactgatggtaagcattctggaatcagaaagcaaaggaacggctagtaaatttggagagaaagcttagtaacagaatgaagggaacagcataaaggataggccctttcagaagaatctctgggtaaaaatcattaagctaaggagacacgtggaaaaagcaggtgggccaaaggaagactcccctccatcaccattttatgaaagaggtctgaggtagggaggagatttcatttcaaaccacacactcttaaacagttcccaaaaccccagccaaaaagagaacggtggcccttttgttggtcaggttcatctgcccaggaaacaggtcactaagtatggtccttgggggtgtggtctccatgacttacaagctgatgaggagttaccaaaccgcagggtggaatgggaaactcagcccaaaacaacttgccctgggctccgggccacgcctgggctctgccgagtcatgctcaggcgcctgcactaatgtgaccccctgtttgttctcaactctgcacctgctctcagctccccctgcctgtctgctgcttgggtggggctctctctgactcatgcctgcacagcaaaggggtgctttcctgggaaggagcaggtcaatctttttatgaagacaagctgtaatcaatcagctgggtataagatggggttttcaccctttccaagctgcatgagctccagccacccctaggaggagacaacatatcacgcatctcaagtgagtggctgtggggaggggcaagctgactgtttggataggtggggcctaagttgtacattatgaccaactgaggccagtggtttccttttaaagtttcttctcttatatgcagacatccttgtttcctgaaataaatatgagtgtattccccaatttctatccctcacctatcatgaggatgttcaaacctgcaccagcttctctcacccaccatagtaggacaatgcctgggatgcaaatcactgggaagacctctcagggggtggctgttttcactcttctaataacagaacaggcaaaatgagaagtttaatgatcccaagaatcctccaaagtatgttttttttttgttttttttttttgagacggagtctcgctctgtcacccaggctggagtgcagtggcgcgatctcggctcactgcaagctccacttcccgggttcacgccattctcctgcctcagcctcctgagtagctgggactacaggcacccgccaccacgcctggctatttttgtatttttagtagagacggggtttcaccgtgttagccaggatggtctccatctcctgacctcgtgatccgcttgcctcagcctcccaaagtgctgggattataggcgtgagccaccacgcccggcccctccaaagtatgttttttaaactgcctgcagatcactaatcagtcaggagagaatgagagactgaagttatgctaataggcagcaacagtgcatgtttcagaggaagtctgacatcgcagctgtgtaaccagcagggatttccttctcttccttggggagaaaatcatcagaaaatactgggccagggctctggaattaaactgacacttgtaaaagagagagaaaaaaaaaacaatctaaagataggtctgatgctgctgccttgttttcatttttgcaataggacctggagggagaatggcaagcagctgattcatctccattgcctgtgaaacactgctactccacgtgtcacttctcactcaggggtcccctcctcactcctccctactcaagggtaacctccatcctgaattttgtgcttatcattccctttttttttctttatagtgtcaacatgttttgttcctaatactgctttgttttgcatgtcttgaactttatataaatggtatcccactgtatatattcttcaccaatggattttttttttaaagattcatcactgtgtataaaggtaatccacagagtgtaatgagtatgccacaatttatttcccttctgttggttcaagcaattctcctgcctcagcctccagagtagttggaattataggcatgcgccaccatgcctggctaatttttgtatttttagtagacacagggtatcaccatgttggaccaggctggtctcaaactcctgacctcaagtgatctgcccgcctcggcctcccaaagtgttggcattacagatatgagccaccacgcctggcctcatcatgttttagtcggttacactaaactgtttttttccaatgaagctttgtcctgagacagtttattctaacacttcatcactggtaggaatagatgtaatgtattagatcatatctattattttaaactattaaattttaaactcggccgactccccacctcccacccccttccaggcaggcagcaaataaacagcttgccaaaaaggaacttcagagttggtctgtatcctggatgatataaccaagtctcagatccttttcccccttgagtggcctctgacctgaatttggattcatataaagacacagacatacataaggtgatgaggtcattctgggaaataattggccttttacctagttaatgaacaagaggaaattttatttttatttttaaatatttttaagttgtcagccttgtgtaggggccatgccaatcttctctgtatagttccaattttagtgtatgtgctgcccaagtgagcacaagaagaaggaaatttaaatgacagatgcataagtcgtcccattatcttgcctccactttcatattgttacgtgtttggtgaaacatcaactctgagaaagttatataaaggaaaaggctgctaaaaatggagtacttgcgcctgtaatctagctactcaggaggctaaagcatgatgatcactcctagagcctaggagttgagtgagactagcctgggcaatatagacattgtcttttttttttttttttttaaaaaaagagggccaggagttatagtaaaatcaggctgcctatagttactttttggggtattaggcagcctgtataaaggaagagaaaaagcattatctgaatatttttttgtgtgatgtgcatcgcccaagatgctttaagattatttaactggaaagctagtaagaaaatccttttaaatctccattgctcttggctgtcacctgaccaggagtccacatctttccttctcaggttgcctactgccagctgaccaatgtgcatcagctaactagacctcagtgtctccaccagcaaagccagggtaaaagacaaccctgcctcctctggcccttgtgacaggggcactcaaagaatcaaaactgacatttctgaggaaacatggcacagactctccctggtcaccacccaggtttttttccttgccccctatacactgaaacctaataccacagacacacggtccaacttgcaaatggtctgcttgaaatctaaacctctctaatggaacataaatctgccagatacctgcatgatcagagtgcagaataacaaacagggctgctggcagtttaatggagttttaaaacacaggcacacacacagacaccaccccccccaccgcctcttgttttgctcccatcccccatctataaaaacagaaaaaataaaatcagatataaatgctataagtagctttatgatacccttctttttaggtctaaagggaaatattaaacattagccttctccaggctcttaatgatatactgggaggtgcaaaaagtcccttgtatttcagaggggcttggcccataccctcatactctgattaagactgtaaccaattcacaaatcagtacaggagcctggagtcactttgaaaacttctcttctactaaggccaaagcactaagtgaatgccctcaaacagagagctgccacctcaaattaaatacccagggccaccctggataaccatggagctaccgaatgctaggatcagggctctgcctctttgagaaaaccaccacaggcctcttgggataaaatataaaatgcaagatctaaacacttggacaggaaatggactttctctgcaaacaatgagagatttttctaaggattttcctctcctgcttacctaaattgcaaggcttgatagagcttcatacagtcataggagtctggagatttttttctttgctcttctaagcaggcagatctggagtggtactttggtgctgggcgagtctgctgggcctattcacttggcagttagcctacaagtaccaaggtgtcctaataacacatcatagattgcagaccctaacagctatatatccaacagccatttttcttactgtcagaggcctgatttgatttgggtgttcactgtcccatgggttcaggaaatgtggcacttccctagatccagaggataaatgtgaatacgcttttttttttttttttgacacggagtctcgctctgtcacccaggctggagtgcagtggcatgatctcagctcactgcaagctccacctcccggcttcatgccattctgctttagcctcctgattagctggggtgaagtggcgtgatctcaactcactgcaacctttgcaccttgggttcaatgattcccctgcctcagcctcccgagtagctgggatttgtaggcgcctaccaccatgcctggctaatttttgtatttttagtagagacggggtttagccatgttggccaggctggtctcgaactcctgacctcaagtgatccacccgcctcggcctcccaaaatgctaggattataggcgtgagtcaccgtgcccggctgtgaatatgttttatccagtcctggaaattctattttcttggccatatgacccagtcctaggcaatgggtggggagcttttggggaaggtcttcctatccagtttaaatgccccttttcttcagccagatgctgtacaatttacagacgcctagagatgtggcagacatctggcaattgtcagacaacctcaaggaccaagctgttaactaaggaaggtggaacagaaagctgtagaacaccagagtccatgattacattaccactgagccactacagagactacttttttgtttctttttaaaggagatgataagtggtacaacttttatcttttatttgccctgcagggtccactcttcagcttctccaccctgtttgctgctgcggaggcagcacaacaacagggcccctagttttctgacttccagagggtttggctattggggagttctggaaggagactggaggaaagagagtgagggcaaggtatttactcccctagctccctcagcacggggctacctcaggctagctgtgtccctctgacagaaagttattgcttgcctctgaaagtgcctttctctaacaagagtctctttccaggttctagtaactgcttcctctctttttgggtctaggagctgtttccaaacagccctgctgatacaagtcccttgattccactacaatgccacacttgtaaatagtccctttataaaactctcctcaatggccaggtgcgatggctcacgcctgtaatcccagcactttgggaggccgaggcaggcagatcacgaggtcaagagatcgagaccatcctggccaacatggtgaaaccccatctctactaaaaatacaaaaattagctgggcgtggtggcgcacacctgtagtcccagctactcgggaggctgaggcaggagaatccagaaggcagaggttgcagtgagctgagatcacgccactgtactccagcctggcgacagagtgagactttgcctcgataaataaataaataaataaataaataaataaataaccctcctcaaataatcctaatctgagtctgctgtttcttgctgagatcctgattgaggtaattgattacttgcagccaaaagcagcctaagtgacatccctagcactagatagtacttaaaatccagaaaacaccacaatataggaaattctaggaacacttcccatttcagttttgaatggaatatgtctgtgggtggcaggaggcagtagtgatgtcatggaagaggaaataaatggcacatacacgtgtcttctgggtagccttggaggaagatgagaatcatatctgaataactctcaacaatacgtaataaacattcaaacacatttttattcacaataaccctgtgagatggatctcttgattttcattttatagatggggtcaggtaaggatgagaaatgtgaagtaacttctcagggttgcagcaagagggtgaaccaggaatggaaaccagatctactgactcaaattctgtgcttttctctccccagggcttgtccctccctccatgaatcaagcctaggaagctgagatggagcaaaaaaaggaagggaaagggaagaaaaggtgattttgggtttatactgcccttcttatcctcatctaagatttttctgaaactccttcaacaactaaggaaaaccacacacattaaaaaaacccaacccaacagcttgcagaagcctgggattccagaataaatactaaaattggcaggacacgtagtatcctttctctcagtgggtcacgtgaggacactgcccaacatctgtcatgtgtgtctgggaatatatatttatttcttgctgaatgctcagatgcctctttcttgtgccaaaaagaactgctacatcctaccttctgatctaatctaaaaatgccatcaaaatctggccccaaagacctacaaattattttaaacacaggacgcttcagtatcctcccagcctcctaagagaatggttcagataaaatcatgccaaatgttgagtaaatgggaggggttttttagtggaaaccataatgctatgctgtggccacattttcacaatacttcgggggcgggagggtgatccctctgcccagataggctggaaggctatgtaacattttgttcaggggaaacacagtccagattcaagagtcaagaccaaatcataagactcactggagtcaaacactggcaccagccccaactgcttctagacagctgtgccttcaccctaacaaaaccacctagaatatacctacatggaaaaaacaaagcagaatctagaaatccacagaatttcagcatgtagcatctcaggaaactgatccttaaatcacttaatatctgatgcttgttcctgctgctgaaggtggctttaaccaccaaagggataataacgtagtgcaattaattactcattttataaccaattaccaaattattattgaaaacagctggttcttaccgatataggaagacattcaagacctggtactgagtggagaggtagactacagaacagtttttgtggcgaaaatagccaccaaaatatgtgatagagtaaaaccttgagaaactggtaatgtcaactgctgtctgtgtgtattgagctcattaactattttttccttttgcaattttctgcatttttgaaaagcatatataattggattaaattgtttttttgagacagagtctcactctgtcgcctaggccggagtgcagtggcgcgatctcaactcactgcaacctccgtctcccgggttcaagcgattatcctgccttagcctcccgaatagctgggactacaggtgcccgccaccatgcctggctaatttttatagttttaatagagatggggtttcaccatattggccaggctggtctcaaactcccgaccttgtgatccgcccgcctcagcctcccaaggtgctgggattataggtgtgagccaccacgcccggccaaaatattttttaaataagaaagaattgtttctaggaagtgctttcatacctcaaaggagttatacacatccgtattctgctgatttgtcacatgatcaaaattactggagaaggctcagtgaaaacaagcactgaggtaaagaaatacccaaattagcagatggtacttatttttttttttaaagagtcggccaggctgggtggggtggctcacgcttgtaatcccagcactttgggaggccgaggcgagcggatcacaaggtcaggagatcaagaccacagtgaaaccccatctctactaaaaatacaaaaaattagccaggcatggtggcgggcacctgtagtcccagctactcgggaggctgaggcaggagaatggcgtgaacctgggaggcggagattgctgtgagccgagatcgcgccactgcactccagcctgggtgacagatcgagactctgtctcaaaaaaaaaaaaagagtcggccaaaggttgcagcgagccgagactgtgccactgcactccagcctgggtgacagagtgagaccctgtctcaaaaaacataaaaaatacaaataaaatatgaatgaatgaatgggccaaaaaatttccaagaatttcagctaagcctcgcattaccttgagagtcactggtatccattttttttttttaagggcagctgaacctagtcttataagatgttgaaaagtggtattaatatttagtatttccatcctttataattatatcaacctgaaagattaaatgcttaatcttccatactactcttttttttctttaaaaaaaatttttggtactgctccttatggggcagagctatcccactggcagtgtgtccagggaaatctttcttttctttttttgagatgttgtttcgctctgttacccaggctggagtgcatggtacaatctcagctcactgcaacctctgcctcccaggttcaagcgattgtcctgcctcagcctcccaagtagctgggattacaggggcccatcatcatgcccagctaatatttgtattttaagtagagacggggtttcaccatgttggccaggctggtctcgaactcctgacctcaaatgatccgcttgcctcagcctcccaaagtgctgggattacaggcgtgagccactgtgcccggccagcccatgcaaatcttaaatgcttacacttatgttttgaaaactggattgatagagaaataagtcttttttgaaaaaatatcacatccaaatcagcttgagaagtagctacagagaaggacacttcatcttgctttagggaacttaaaaggagggagaattggagaaagtcactgactcaccttgccagcaagatcccctgatactcttccagttgtctcatgaagcttgggttgggcttggttaccgttcgtctttctttcacatagtcataggctcggtccagattccagccatattccttcattgcataggcaatcacggtggaggctgagcgactcacccccattttgcagtgcacaaggcatttagatccatgtttccttgtttgggggattgaggtaaagaatagaggaaaatacaatagtggggatattttaaaagttggtttctagatttttccaagtgtcctgtcctgctcttccattttcttgctatgcaatctctccactttggtacactcatatacatttataatcaaatgtgtgggtagggtagagtgaggcagctcactactaattattcaatgttaatattatgcttctttaatccattcagcaaacatttaccaggcatttacaatatgtgtaaggcaatgtgcaaagtgctgggatgcaaaggtaagtaacatacagcttttatcctaaaggataggattcagtgggagaaacatacaattaaaatgcagtatggggctgggtgtggtggttcccacctgtaatcccaggactttgggaggctgaggcaggtggatcacttgaggttgggggttcgagaccagcctggccaacatggtgaaaccccgtctctactaaaaatacaaaaattagttgggcagactgggcgcagcggctcatgcctgtaatcccagcactttgggaggctgaggcaggtggatcacgaggtcaggagttcaagaccaacctggacaagatggtgaaaccctgtctctactaaaaatacaaaaaaattagccaggagtggtggtgtgtgcctgtaatcccagctactcaggaggccgaggcaggagaattgcttaaacctgggaggcggaggttgcagtgagccgagatggcaccactgcactctagcctgggcaacagagcaagactctggctcaaaaaaaaaaaaaatcagggtcctgattaggatgagatataggagcattttaagagatacacacccttaggtgctgattcatgcttgcaaaagcctgagagtgagtgccctcagttgtgcctgggtgccccgtacgtctctccctaatcctaagtaaaattagcctttcttttcactgggactggggcctagccttctagtaccttttccttatagaactagactattccagtacccttggattctgaaatgagacaagtttttttttttcttccccctaaacccaggctcaagtgcagtggtgcgaccacagctcactgcagcctcaacctcatgggctcaagcgatcctcccacctccctcagctttccaagaagctggtatcacagacatgcaccactgtgaccggctaattaaaaaaaaatttttttttgtagaaataggagtcttgctcaggctaatcttgaactcctgggctcgagtgatcctcccgtctcagcaagatctttgttcaagtcctatcttcaccacttatttgacctctctgaatgttgacaacatctgcccctctggatcttagaaaatactacatgagagaacagtaagcatgccatgaatggtattattactgggaataatttattaacagaattcaaaaatataaaacactcttttaggtacttgctgagaataaaggaataggctcaaagctagagtatgaggatttagagaaactaagaggaagaacttcctgaccgtgaaggtccttaagagaagtgtgaaattatttttgaaggagtttaattaaatacaaaagcacttctcatctgccagggatggtttgaacatagtcctacctgaaggaagatgtggcaaacaagctcgtttatggttctctctagtaaaggaataaataggattggcaaggaaatccccaaggacttaaaaacaaaaaggcagtgttgacattaataccaaacactaagttaatacaaaatactctcactagaagagccaactaatttaaggaagacatcaacagaagggccacagaaaaatttcatcatttagagtatcataaaaataaagtaagagagtaggaaaagatttccaaagtttgtctccttatcttcagcggggaggaccagtattctatctatctgaaataatttctatgatataacttttaaaactccccactggcaacttaatttcattcagaatttcttccttctctcatttctgtatcttttgctgcagtttaagtctattttctttaattctgtgctcaatggaaatagccaacatgaggttactttctcctaggggtttactttacttaaagtgagtcactagtcttttgcctaggattaaaaagatttcagtctcctcctttccttagttcctttttcctgagtaccatcagtaagttgtctatagccctcaggacccagccatgtgtggtggggcaagaggaacagagatcacaacattgtgcaggactattactcactttgctttagagatgaatttgtaagtgtcattccagtacgccaggagatccgttgcctcttcatcatatacccgaatgttatgatactcaaagactcctgggaagaagttatctatctctcgagtgacattcaagatataccgtaccctgcaaggaaaccaagggagaatatgtgctctactactcaggctaaatccaattcccagcactgttttttcttacttaaaacttgtttattccatagactgaaattaaatacaaaaataatgaagacagctaaaaaactaagaggttatatttatttattagagaaatgatacagcagggttcctgggcatacctgggcaccagggaattattaagcaaaaagttattcaccatgttcaacatctaaattccattttcagtttatgtagttataaaatcgtatccttgatagtattctgaaaatatgcctcatattttactccaaagaatcaacttgagtccataatcagacactttctcagttactaaaattgtcagcaatacaatttattctctgaaagtcatctgtataaaatcagactactgacatgtaccccaagtgaaaaaagagagaatgaataacgatttcttcctatttttctaaatgccagattgttaggctttgtgcaattactctctctaaactacatgaaaggcaaatgaggacagaactggaagggtcagagaaaagccggacttaaaactcccttaaactcatttgactgcattactggctgctatggcatcgatgtatccgaagattcttccacactaagatgcttgcagaagagagtttctgtatcaaaacagtcttctattatctttctcactgcacaatctcaataaatgcttgagctccatttaccaaatattatcttttcttaatgctgtgatttagacatagctggatgtctaagtttactccaacaatacagcatggactcactcatttctctctgagacattgcttccttctcagcacaaatgtgaagttccataaacccaaactctgaaatcaatgaaatgaatacagaaaaagaaagcagccatagctaaccaaatctgtggttaaggtcaagtggccaaaaattttctcagacacgaattgaatctgttttaacttggcatcaaagcccattactacaaatttttttttttatttaatttaaaaagcgagcttggccaggcgcagtggctcacgcctgtaatcccagcactctgggaggccgaggtgggcggatcaccagaggtgagaagtttgagaccagcctggtcaagatggtgaaaccccgtatctactaaaaatacaaaattagctgggcgtggtggcatgtgcctgtaattccagctacttgggaggctgaggcagaagaattgcttgaacccgggaggcggaggttgcagtgagtcgagattgcgccattgcactccagtctgggcaataagagtgaaactcagtctcaaaaacaaaaaaaaaggtgcaattgctatggaaaacagtacagcagtttccccaagggtaaacacaaaattaccacaggacccagcaattcctttccaaataataaatccaagagaaataaaaatataagcccatctgaaaacttgtacacaaatggtcacagcagcattattcaaaacagccgaagagtggctctttgttagttgatgaacattagtgatttctagggattgttggggcaggggtaagaagaaaaatggaggtgattcctgaagggtacaggctttccgagttgaaaaaatgttctaaatggattgtggtgatggttgcacggctctatgaatatactaaaaaccaacaaattatacatttaaaatgggtgaatcatatggtatgtaaattatatttcaatgaaacttttagaaaaaaaggcaacactccagcctgggtgacaggaaaaaaaggaaaaagaaaaaaagacaggcaacacactttccttattttattttattatttatttatttattttccccaagatggaggcttgctctgtcgcccagatctggagtgcaatggcacgatcttggctctctgcaacctccgcctccccgttcaagcaattctcctgcctcagcctcccgagtagctgggattacaggtgtgcgccaccactcccacctaatttttgtatttttagtagagatgctgtttcaccgtgttggccaggctggtctcaaactcctgaccttgtggtctgcctgcttcggcctcccaaagtgctgggattacaggtgtgaaccaccttgcccggcctccttattttatttaaaataaaaatgaacaatctcccacctctaatcccatacctcataataaattatggcactatctttctagaggcaggacacagcttcccaatccttttcattacaaagctgtaggcagtcactgccaattggaactgaaactccttgaaacttttttcccatctcagcaccaaatgactctatacagagtaacattttactttgggtaaggttctgaagtcagcagattggatggaaatggccttaatgtcaaaattacccttgaaaatcccattaagtcatctataggcagcactatatgtggttttgtgtacagatccctgaactgtaattcttcacatattaaaatttaacaatcactgaatttaagaaacaagatctaagtagctatctgggaatttgaccatactgtttttaaagacaactagatacagttagttgcattttataatttagccttctaagaagcaaatgatatgatgggtctcatctccagctggggttatattctaaattcatatgtatatatgacatgattccagtgcttttggcaaacactgctataccgcatctcaggcttaatattaaacactgtatctaggtttcccagaagtacagatttttttttttttccccagacagagtctcactctgttgcctaggctgcagtgcagtggcatgatctcagctcactgcaaccgccacctcccgggttcaagcaattctcctgcctcagccacctgagtagctgggattacaggtgcctgccatcacacctagctaattttttgtatttttagtagagacagggtttcaccatgttagccaggctggtcttgaactcctgacctcaagtggtccacctgcctcaacctcccaaagtgctgggattacaggcgtgagctactatgcctggccagaattacagaatttttaaagcttgatgacttgagaagcttgtaaaaaacattgtcccactcctaaagaaatcttaaggagactcttgtatataaagcagatgcaatgttattaatcttgttgaattatggggtccttatgcttcaggggcatttccaaataaggcaaatggcagatacaggattagaactgaggtctctgaattcccaacacagtttgctaattgattttctctccttatctgccatcagccaagtcacagtgttcaaatatgtgtgaacatacctatcattcattcacatttactgagcaccctcttgttatacagctctgagctaggtagatagtaagctataagcaagactaagatacagtctctgccttgaagaactctagactttcttattaagttttccaagttttatttaacttcaaattttaaattaagcaaccagattcccctccccaccccccggaattctttgtataatcatttggcttaagtcctgttccaagttcatttggccaattatgaaatacttttcatgtggggaaaaagtagggagtatttatccactaatggtaaagataaccaggaggcttatggctgagaaaacaggcagccagcaaccatcactacctctgagtctcagctggtcttatctctttccacaatgagttagcatggcaaatttcagaccttattttctcttttcttattgggattagctgacctcctaaagtgaatgaacttcaataagaaacttagtaggcatcagctaagggaaaaatggcagctttttacttgctgaatgttcactgtagtctctattgttacaatcaaacttaataaccatgctgcttagggacagttttcttaatataagataggtcctcttcaatttcagaagcttgtccagttcacaaccataacctacagtctttaagcagcttactacacaggatagggactgagtcttaatttatctgtggatccccagcacctagcactttgtcccacagaagacgctcaatcaatgttgaatgaacagctctgtgaaccctacatatgcaattctatgtattcttgcataaaaataaaaatttgattttaaacatcaccaatggtttgcacatttgttcttcaaagcccttcaattaaagcagctggtattcttgggaggtggggggacgaaacagggagaatagctgtttttctttttcttttttttttgagatggtgtctcgctctgtcaccctggctggagtgcagtggcgtgatcttggctcactgcaagctccgcctcccaggttcacgccattctcctgcctcagcctcctgagtagctgggactacaggcgcccgccaccatgcctggctaatttttttgtatttttagtagagacggggtttcactgtgttagccaggatggtcttgatctcctgacctgtgatccacccgcctcagcttcccaaagtgctgggattataggcgtgagtcaccgtgcccggcccagctatttttatttttcttagattacatctgattagaatcagtcagatgcaactcttaagattaaagttacccactgatacctctttgatgggaaaatgaagataaaacagggacttctgttacacaggggtgccagctattgctttgtgtgcttaccctcggttctgtaagtcctctaagttggaggcattccattctgagccctatggagccaaaaagacaaggttaaggagtattagcaaatcaaccaaacaatacttgaaaaggagcgagagaagaagaactttcaaaaagaagactaataacatctaccagtgccctttaagttgccaggcacttcatatgttatcacatttagttttcacaaatgatagagtaagaatgttattttcatcttcatttttacagatacaaaaaccaactcatagaattcaaataatttttgcccatgatcatacagcaggagaggtgtctttaaccatcatccaatctaaattagatgtcttctgttattcttgctcatagtaatctcctattttcctcaacagcatgtatcacaatttgtacctatatatttatttatgtgcttactttctaactacctttaatataagctcctagaggtcgggaaccagctcttttcttccctatggaaacccacgcaccttgcacagtgcctggcacctggcaggtgctcaataaacatttgctgaatttttacagataacaaaagcagcattattatgcattgaactacaccttattccaaagctcacactcttttttttctgagacagcgtcttgctccatcacccaggctggaatgcaatggcgtgatctcggttcactgcaacctctgcctcccgggttccagcaattctcctgcctcagcctcctgagtagctgggattacaggtgcgcgccaccatgcccagctgatttttgtattttttagtagaggcagggtttcaccatgctggtcatgctggtctcaaactcctgacctcgtgatccacccgcctcagcctcccaaagtgctgggattacaggtgtgagacaccgcgcagggccgctcacactctttttagtgcattaagttgcatctaaggagttaaaggacagaacttgtgtgtggcaggagaagacactgaaatagcagcttctgtcaaacaaatgagggaaacattatatgtaaaattttaagatagggataaatggcaaactttgggggaagaggttctgctgatgatctggaggacacaattattaatattttgccatatttgctttctttccttctttcccttttcttttagtacatatcatactttttccccctgaaccatctgagagcattttgtgcaccatgacactttattcaatacttgagcatgtatcatctaagaacattttcttacataatatgatcataccaaagaaatgtaacattaacacaataacctgatacactatacatatttgaatttctacaaatgtccccaaaatgtcctttatatttactcaatcaaggataattcttcacatttagttgtcatgtctctatcctctagctacacttttttttcttttgagacagagtcacccaggctacagggcagtggtatgatcctgactcactgtaacctccactgccagggttcaagtgactctcctgcctcagcctcctgagtagctgggattataggcatgcatcaccatgcccagctgatttttgtatttttagtagagacagggtttcaccatgttgcccaggctggtcttgaactcctgacctcaagtgatccgcctgcctcggcctcccaaagtgcggggattacaggcgtgaggcactgtgcccagcctactttcttttttctttttgagacgggagtttcactcttgttgcccaggctggagtgcaatggcacaatctcggctcactgcaacctcctcctctggggttcaagcgattctcctgcctcagccacccgagtagctgggattacaggtgcctgccaccatgcccagctaattttttgtatttagtaaagacgagatttcaccatgttggtcaggctggtctcaaactcctgacctcaggtgatccgcctgcctcggcctcccaaagggctgggattacaggtgtgagccactgtgcccggctactttgttttttttttttttttttttttttagagacagagtcttgctctgttgcctaggctggagtgcagtggcacactgcagccttgaactcctgggctcaaaccatcctcctgcctcagcctcccgagtagctgagactacaggtgggcagcaccatgccttgctaatttttttacttttgtttcttagagatggggtctcactatgttgcccaggctggtctcaaactcttggcctcaagtgatcctccccaccttggcctcccaaaatttgggattgcaggagtgaaccaccacacccagcctagctttaatctagaacagtacatcttctgctttctttgggagtgtgggagggggtctttcataatattgacatatcgacatttttgtagactccacatctgttatcttggagaattccccacaatctgtattttttttttttttttgagacagagtttcactctgttgcccaggctggagtgcaatggcacaatctcggctcaccgcaacctctgcctcctgggttcaactgattctccttcctcagcctcctgagtagctgggattacaggtgcgcaccaccacacccagctagttttggtatttttagtagagatggggtttctccatgttggtcaggctggtctcgaattcatgacctcatgatctgcccacctcggcctcccaaagtgctgggattacagacaggcatgagccattgtgcccagctgtattttcttttttaagaggtgggtctcgttatgatgcccaggctggagctcagtggctattcacaggtgctatcattgtgcgctatagccttgaacttctggcctcaagtgatcttcctgcctcagcctcctgagtacctgggactacaagtgcatgccaccatacctggcttgtattcaattttagagtgctttttctattctttcccatttaatattttgggcatacaaaacttttatgtgattaaaagtcaaaagcttattaaaaagtaaacttagaggctgggtgcagtggctcacgtctgtaatcccaacactctggaggccgaggcagacggatcacctgaggttgggagttacagaccagcctgaccaccatggagaaaccccgtctctactaaaaatacaaaattagccaggtgtggtgacgcatgcctgtaatcatagctacttgggaggctgaggcaggagaatcacttgaacctgggaggtggaggttgtggtgagccaagattgtgccattgcactccagcctgggcaacagaagcgaaactccgtctcaaaaaaaaaaaaaaaaaaaaaaaaagtaaactaagaggtctcactctcactcctatctctttaattcctattggtgacattttcattagtttctgatttactctattttgaaaaaatataagcaaacatatgcttattgctacttcttactcatattaccaattcttactaatatgctacacataattttttattaattgctttcattttacatatatttcattttatatatcctcaaaaccactaaatgtaacagttcatagagatcttattttttcctacatctgcatagtacttcatgagtactgatataatagtttattcaactagtctcctatgaatgatatttcttatttgtggaagcaggtttgctaggtcaaaggcaggatacacttttgttaaacactgcaaaatttccttccgtagaggctgaaacaattctgtggtcccaccagcaatgcatcagagcaccactttccccacagcctctccaataaactgtggttaagcttttgaatttttgccagtctgataggtgtctcagtgtagtttcaatttgcatttctcttagaagtaaaagtgagcaacttttcattgtttaagatctattttctatctttgagctatctgttcatatcttctgaaaaggcagacattttattttattttatttttgagacgagacttgctctgtcacctaggctggagtgcagtggcaccatctcggatcactgcaagctccacctcccgggttcatgccattctcctgcctcagcttctcgagtagctgggactacaggcgcatgccaccatgcccggctaattttgttttttgtatttttagtagagacggggtttcaccgtgttagccaggatggtctagatctcctgaccttgtgatctgcctgccttggcctcccaaagtgctgggattacaggcgtgagccactgcgcctggccagacattttatatatattttttgagacggagtctcgctctatcgccaaggtggagtgcagtgacgtgatcttggctcactgcaatctccacctcctgggttcaagtgattcttctgcctcagcctcccgagtagctgggattacaggcacgcaccatcatacccagctaatttttgtatttttagtagagatgggtttcaccatgttggccaggatggtctcaatttcctgacctcgtgatctgcctgccttggcctcccaaagtgctgggattacaggcgtgagccaccacgcctggtcagggcagacattttataataagagtttactctttcagaattagaggcattaatggaatttagcattagaagacttaggttcaagttctgactgcccttcctactgtgggtggggacattagggccaactgcctaacctctccttttttttttttttttagattgcagtctcgctctgtcgccaggctggagtgcagtggtgcaatctcagctcaccgcaacctctgcctcccaggttcaagcgattctcctgcctcagcctcccgagtagctgggactacaggtgtgcgccaccacattcagctaatttttgtatttttagtagagatggagtttcaccatgttggctaggatggtgtccatctcttgaccttgtgatctgcccgcttcagcctcccaaagtgttgggattacaggcatgagccactgtgcctggccaacctctctgtctttatctgtaaaatgaaaaccccttcccaccccagtagtatatatttaatgggtacatttccctcaaattatacatgcaaagtttttcccatattaaaatggaaaacccctctctctctcataaatcctcctgcagactctgtcctttctccctttccttcatgacttcatagaaataaagtcaaatactcactttctggatgggtgcagtggctcatgcctgtagtcctagcactttgggaggctgaggtgggcagatcacctgaggtcaggagtttgagaccagcctggccaacatggtgaaactccaactttactaaaaatacaaaaattagcctggtatggtggtgcgtgcgtgcctgtaatcccagctacttgggcggctgaggtatgagaatcacttgaacccaagaggcagaggttgcagtgagccgagatagcaccattgcactccagcctgggcaaaaagagtgaaattccatctcaaaaaaaaaaaaaaaaaaaaagaaaagcaaatactcattttctctatttcctcatttcccacgtatctcatccatagcacttgggcctctgccctcatcactctcgctgatgttactaatgacctctcctaattgtcttatcaccactgtatccttattccattggccttctctgagtatctatctgatatggctcatcatgctctccttctagaattagatcagactgtacaaatacctagtctcatacctcacacaataaagaggatagacaaacgtttgttaattggaagatcaaatgtgaccagtaaatgaagcactgtgaaaattgttaagtgttgtgtaagtactatcatattacaggtgatctgtaatctggccgttgaactgggaaagctcaaggacactgtgctgaagttccatttaggaaaaggtcagtggtgatgtacaggcaagagccctgctggcttgttttaaaaaaatatgggaggctctgaaggctctgctcaaccttagaaaacaagcttctgcaccaaagaaatagccaagaactacaaaggacttcaaggagacagatgccaaacaataggggctgagaagttaaactggagccagcgaaatgtgaccacctcacttcttaatttagaaatctaaatccttcgtggaactctgtccagttagatgaaaataacattgacacgatggataaagtccctagttttcatctacctgtccagagagagttcaacctgacaatgtgaagtgatacctatccattggcaaataaattaaaggcactggttactgactcactgaagcccatacaaagggacttgggctacacttagggctgcttcaggttcagtttgaaagacctagagaccacttggtataattacttttctgtactcaatacaaatgccatgtatattagacttccggggctctttgcagacccaatttcccccccgcccatgcttcataggcttatggtgacgtaattctaccagggtttccattatgttctatgtaattatgcaaagcatattctaattttactgaagtgtaaaatgaaacctttggactataatacattttaaagtaagttcatttccatcttttactctggttcccttgcactgtacgctggcccaaagacccaagtaactgatttcttttcatgctatcctcaggaaatagccttgctggagtccaaatgtccaaggaaaatagaagactacagcacatttatagcaaataaggactgtactgtgggagttctgctaagataaatataacttgacataatatccaaggactggtatctctgtccatattttatcatatcattcctatagcctcaatactgtaagtcacattactgtggcaaccaggcataagctgtttattaacttttccttctaagagaaatttatgccacacctcctgaatttatcacattcagggacaaaaatcatgaatgtgataaaataatcctttctattactgtctcacctatttacacaccctctgtttctcttcatctacattaaaagtaaccaatttgaggatttttttttaacttttaagttcaggggtacatatgcaggtttgttacataggtaaacttgtgtcatgggggtttgttgtacagattatttcatcacccaggtattaagcctagtactcattagctattttttcctgatcctctccctaggctgaatttttttatgaaaaggaaacactttcccaaaagatgtcaaatcttgtaatgtcaaatcttgaaaaagataatcagcagtaaaagttctatttttcaaattcatgagcaaaattattggttatgtgtccaatatacttgtttgcctgcttttctgcaaagggtctctatcaacatctagctttttctcagccaaatcggacagcctccaggagagctgatgatactgaaacttagttgggcaaaggcttccagctcagagaagtgatatgcttgtaagggtgtagaatctctttttctagaaacaccctggcttcccaccaatcaattctctcttctcaatgcagcttttatttaagctataatctacactttcccactccataccagctggatactttccctaataaacagatctctgtgcagtacactgcagaactgagcattcttccaaagggaaggagaaatcctgttgcctctctttactcaatctggttgagctccaggcatggcagctatgcaagatgagatgactctgcagaaaatcaacaccaccacttgcagctagaatgcctctttttccgtgtcaactgctaggaaagccagcagggcaaagactcaatggagaagagatagggagttggacataggatatggcagtgtaaacaaagggaggaagccaccaaggaacaagtataataagatgtttagacaacctgttcatgcatttactttgttaagtaggatttaaattacagagatcctcaattttgaagttttttttcccccaaataaatattcacaatagaaagaaaatgtccattttctagaatacagaattatacctgaagctgaagagattttcctttgttcaaaaatatgtacatatatacacaatgctgatgtgcaaaacaagtacacagatgtgtatttaaaaagtaaaaacttctatgtgatactctaatagtgaatacagacaacaaatttgtccaaatccatataacgtacaacaccaagagtgaaccctattgtaaactatggactttagtttacaatgatgtgccaatgtagaataatgtgctgtaacaaatgttacactcatttgttacactccactctggtggaggatgttgacaatgggggaaactatgcatgtgttgggataagttgtatatgggaaatctctataccttttgctcaattttgctgtgaacctaaaactactctttaaaaaaataaagacaatgtatcatatctgtgtgtgtatacacaaaaatatatatgtacatctataaataaaagtaaaaaagattggggctgggcgcgatggctcatgcctgtaatcccggcactttgggaggctgaggcgggaggatcaggagttcaaggccagtctggccgacataatgaaatcccgtctctactaaaaacacaaaaaattagccaggcgtggtagtgtgtgcctttaatcccagctacttgggaggctgaggcaggtgaatcgtgtgaacctgggaggtggaggttgcagtgagctgagatcatgccattgcactccagcctgggcgacagagcgagactccgtctccaaaaaaaaaaaaaaaagattggaaggcaatattatataataaaagatgatggtgattatcagtcttgatgattaaataaatatgataatctgttgtcttctaaaatttttaaaaatgaacatggattatcattatttttagacaggctctctctttgttgctcagggtggagtgcagtggcatgatcatggctcaccgcagcctcaaactcccaggctcaggtgattctcctgctttggccaccccaagtgctgggattataggtgtgagccaccacacctggccagaattatttttttaataagaaaaaaactcaagacagaagattatacctgacaataatgaaatcatggtattaatctactggcacaaatgctcaaatgcatttgtagttgattagagaaatgtaattttggggaaattagattgttttttctgcttacaatactattaaaatttgcttgcatggcctaaaatataccatttgaggagtagttcttgagtgggtggcaccagagacacagggaagcatgcatgaaataaaacaggttgatcagtcagaatctgactgtatttcatatttatcatgtctatattcttttacgtgttaaaagtcaagctcaatgggaaacttgactttcaagtttgcagcttcagtcacatgagctccttttgactacagatatttgtccttcataaaaattagtctcagggaaacagttgggagggccccatagaacgagtgactcacaagttttctatagataacacaaagattctttccaataatacaagagcaggatatatctgaatccttgtggaagtatatgtaagagacaacaaagccaggtgtcttgcaaatggaaaagccaatgacagttttgcagtatgatctacaaccagaaatgccaacacatactggtcagttaaagtaatggaaaagaagtccccctcccaactcacagcttttcatgagtaatttcatagctaatataccactatgaatcactctagacacatatatcctagagtgtcaacaagttatttcagggcacaagccttcaaaggcatagtctgagtgcctcatgaaataaactcttgaatattcagagtgaggtggatccagtttagtcagttcctgagcatttattctccttctcttctgtttcccagcttctaatcatttcacagttcataaacgtcctcaagaagagaaaggaagtgaaattcaaaccaactgatttacttccttgtaagcatttttggtgaaagtgtgtgggaagtggacacaaaatgaggttttggcattctccattgattttaattattcttgttaactttgttcccactaaatgtacagataagaactaaaactctaacacttgagagaaaaatagactttagaagctttcaaaatctacctgtcagagaggtctccttgggctaattacaaaaggtcactaaatgttcaggaaccatgaagaacaatttttagtcaccaattttttggtaatcataaaagtagggactcaaagtgtagctacaaggtttcatatgtttgaaagtccagtagtctcttgtctctcagttatatagtagctcccaccagctctgctcagatatatcagaacttagacacatttggcagatttgagagtgatcttaaaggatcatcctatttggggccaggcgcgatggctcatgccggtaatttggggccaggtgcgatggctcatgcctgtaatcccagcactttgggaaggactaggtgagtggattgcttgagctcaggagttcgagaccaccctgggaaacatggtaaaaccccatctccacaaaaaatacaaaaattagctgggggctggtggcacacgcttgtggtcccagctactcaggaggctgagaagggagaatcacttgagcctgcgaggctgaggttgcactgagctgagactgtgctactacactccaggctgggcaacagagcgagaccctgtttcaaaaataaaaataaaattaaaaatgagggccaggcatggtggctcatgcttataatcccagcactttgagaggccaaggcgggcagatcacctgaggtcaggagttcaagaccaacgtggccaagatggcaaaaccccgtctctactaaaaatacaaaaattagctgggtgtggtggtatgcacctgtagtcccagctactcgggaggctgaggcaggagaattgcttgaacccgcgaggcagagattgtagtgagacgagatcgtgccaccgcactccagcctgggcgacagagcgagactgtcacacacacgcacacacacactaaaagtaataaaataattaggaagtgatgaggtttgagtacttatcacttttgtctttaaagtaagttacattttatttatgtataataaaatttaataattacccctgcccatgagtccatatgggctagcgttagcacaccacttaaagtggctttaaaacttaccaggaacacatgctcaaatatctgtgtagggctatccatttgaccaaggatcactatcatttcattgtctataaattccttgaattcccgcaagttgcacaccatttgcatttccaactctgttcttatctgaaacaaagatgatatattggacccatctcttaaagtccctctgtactttcaaccatgcactatttccagccccacacctactgttatcccactgctagccttggaacaaacaaggactcaaggtctcttacctctttggatgtaatattctccaaatccttctgcatcatgatctcccttaatttggttttaattagcctttctgttcgttcacgttcagtaggtctgagaagagagaaataacgattattcttaaacgatattcttaataacgattattcttaaatgggaaagaaagaagaatgatcctgtcttcttcaataaggcaaatccttttccaaaatcggttctagagatcaacaacttagagcgtgggtccccagtgagtaccggtcagtggcctgttagaagccgggcagcagaacaggaggtgagcagcgggcaagcattactgcctgaactccgcctcctgtcagatcagtggcagcattagattctcataggagcgcaaaccctattgtgaactgcacatgtgagggatcaaggttgtgtgctccttatgagaagctaactaacgcctgatgatctgaggtgaaacagtttcatcatgaaaccatccccactccactgctccgtctgtggaaactggtctctggtgccaaaaaggctggggactgctgacttaagagcccttccatccagaatgctttccttttaatgacaactctcacaatatctctgtgaaacacttatccttttctatagggagaggaaacaaacaactgaaaagctaaatgacatgctgataaccatgctggggcaggagaactacaacgctcagcctagcctaatgctctacctgaaggattatgtcacttcctttagtcttctgactctcttaaaaataaaatcacccttggaactttaatatgaaatcaaactaggtagctgactctccaattattagaaaggtagtggttcaatgtaactggatactcctcctctaaagcattatttcagattatgcagaatttgaatgaggttgacagagagtactttgtttcatctcctccccaactcccaccacctactcaagaaaggtatctggctctgcacctccttatttggagatgaaaatggactaagctttcaggcatcctgcctgcccttgctgcctacagccttatcactggttgcaaaaatagctttggtaatctccaaagatggatgctccaaccccacaaccttggggcttcccaccacttggactcttaatttctcatgaaccctacagaatacagctaatacctgagctgtttctcttcaaccagccaaggtattcctgtcttaactaggattaaaattcttatccatgctttatttgtcctagacatagctaatggtagaaaataaatgtataatttcagtcttccattaaaaataaatattgggccaggcacagtggttaatgcatgtaatcccagcactttgggaggccgaggtgggtggactgcttgagcttaagagtttgagactagcccaggcaattggcaaaaccgcgtatctacaaaaaataaaaataaaaaattagccaggcatagtgacacacagctgtagtcccacagctacttgggaggctgaggtgggaggactgcttgagccccagaggtggaggctgcagtgagccctgattgtaccactgcactccagcctgggtaacggagcaagactctgtctcaaggaaaaacaaaaaggtaaaaacaaattttagtacctgtgttcatgggtcagattccctagttcctaagcaattttcccctcaatccctcacaagtgtttgaggcagagtggttggggagtagaaagacctaggttttaatcccagccctgctattggtggtgtgacttctaacaagttccttctcttccctgagcctctgtttccttttctataaaatgagtagagcaggccgggtgtggtagctcacacctataatcccagcactttgggaggctgaggcaggtggatcacctgaggttaagagttcgagaccagcctagccaacatggtgaaaccccgtctctactaaaaatacaaaaattagccgggcatggtggtgggtgcctgtaatcttagctacttgggaggctgaggcaggagaattgctggagcccgggaggtggaggttgcagtgagccgagatagtgccattgcactccagcctgggccgacaacagtgagactccgtctcaaaaaaaaaagaaaaaaagagtagagcaataatacctgtctcataatattcttatgaggattaaacaacatgtatgaagtgctgggcataacaccagatgtgtatcccatatatgtatattcccttcttcctcctttccttagatttcaaaatataaattattcacagcagagtatttcagtccattttggcacacattctccctgtattctcagctttgttttataagcttttctagtcagtttagggaggaggaggaatggaaaaagcattacaacacacaaatctgctttttcctcctcaatttcattggagaaaaatttggaaaatacataaaaatataaagtaaataaaaaccactgaaaatccctctacccagagataattattaacactctggcctacagctttcatgtattctttttccgtaaacagacagaagttcttaagatatatctcaaaattagggttattattatacatactaagaactaacagttaataagcctctatcatttgccagggactgcctttatgttttttgcttagggatgtaaagagagtaagagcaatatctttcttcctctcttcttgtttgttgtgtagtatcaaaatcttctctaataaaatcttttttttttttttttttgagactgagtctccctctgtcgcccaggctggagtgcagtggtgtgatctcggctcactgcaacctccacctcttggattcaagtggttctcctgcctcagcctcctgagtagctgggattacaggcgcctgccaccatgcctggctaatttttctatttttagtagagacggggtttcaccatgttggccaggctggtctcgaactcctgacctcaggtgatctacctgccttggcctcccaaagtgctgagattacaggcatgagccaccacccaccacgcccgactgtctctaataaaatatgggaaaaatgggaagaaaagttacctctctctcatctaagtctggtttagaatgtgcttttttgagctagatgagacatccatttctctgaaacccatcatccagctgtaaagcatgaaatcaccagtaacatttcccatgaacctttatcttttcaattactgtgagatcttgaaaagaccaaggctactaaaaagaaggtcctagcagcaaaaacatcctgtgcaaaaaaagattccactgcttttttgactgttcctttcatacaatttttggaaagttcaccttttctagtaaagagcattttttagggcaggtgtggtggctacgcctgtaatcccagcactttgggaggccgaggcaggcagagaccagcctggtcaacatggtgaaaccccgtcactactaaaactacaaaaattagctggccgtggtggcatgcgcctgtaatcccagctactcgggaggctgaggcaggagaattgcttgaacccgggaggcagagattgtagtaagccaagatcatgccacggcattccagcctgggcgacagagtgagacttggtctcaaaaactaaaataaaataaattactctgttaaaaaaaacccaaaaaccatgaactgttttggcatgactttaggaatctaaaggagaatcctgaaggtcagacagtaactagctactcttctttccctgctgtagaataccttggaagtgcagaaagatcaaattagagcaaaagaaacatcatgacgaatttacaaagcaggcactaagtgtaaaaaaatttccaaaatagtcacagaagtttcaacacatagacctaaaaaggaaataaacatcagctttaccttaggcctttatctaactcacagtacactagggagatttaattaaattgtactgacaaggacttaacaaggcaaaggtagagcagaatgacatctgaatgataaaatatttaaaaaaaattttttaagttaaaaattagcaggctgggcgtagtggctcacacttgtaatcccagcactttggtaggccgaggcaggaggactgaggccaggagtttaagaccagcctgggcaacatagtgagaccctatctctaaaaaaataaaaatttaaaaattagccaggtgtggtggcacatgcctgtagtcccaggtactttgcaggctgaagtgagaggatcacttcacccaggagtttgaggctgcagtgagctatgattgtgccactgcactccagcctgggtgacagagtgagatcctgtctcttaaaaaaaaaaattagcttattagttaaggcattcttttaagttgactggaaacatcttgttttaagtattacaaacatgactttgaaagcttctttatatcactaatatgcttactaaaatgattctttcagataatgcaaactcaaacttcagcccaactcctttaaactcaaatttcaaattaatggaatctgaataatgaaattttatcgtattgaagtttttgactatggagactctattgtgccttggggtgaagcttctcaggcctttgcaggcaacagcaagaataggattcttcatatgtggcagacacgtgctattcacaatgactaatattcctaggtaagattaactccccaagagaaaagattagggaggaacatgcttcttatgactcctcaggacataatggagagaacttccataatccttagcaaactgacttacatgtcggtgaagagagctggagagtcgggccggtgggactgtacatcttgcattgcattccattcattgactgaggattgatctgagttgatatggctctcataataactcacccaagtgagaaataggctgcctgggtagtagttatgcgctctggcgacttcacaagccttgtgtaagctctgtagtgcagacctgaaagacatgctgggaaatgagcaccatagaactgtggggtgccaaaggccaataacctgtgtactccaaactcttctaatttttaaattctatagaatttgtcctctggacaatctactccttgaaagtcaagattctccaattctgattataccatattatctatccacagcaatggacaagacatttgctgaaagatatgatgcatcattaaggtagggagaaggcggggaaggacagctgacaactcaccagtgaaaaataggtccaggtacctatggagcacatgatcctatagttgggaccatgcagtgactgccgtatcattagaaaactaaagatctgaataatttgccatataaagatttgtttccctcagcacaggatgttacagcatatattttctgtaattcttaacaggcttcacaaagatcacatagatagatgtccctaagccttgaggacatgtcctttaatgtccaggaagtgttgatctaatgatatttattattcctgctgccttagtctcctagtctctttaaatccatgagctactttctaagaacagatctggttattcttttttgttgagacagtgactcactctgtcacagaggctggagtgcagtggtgtgatctctgctcactgcaacctccacctcctgggttcaagtgattctcatgcctcagcctcccgagtagtagctgggattacaggtgcatgccactacaccgggctgatttttgtatttttagtcgagacgggtttttgccatgttggtcaggctggtctcaaactcctggcctcaagacatctgcctgtcttggcctccaaaaatgctgggattacaggcgtgagccaccgtgcctggcctagctctggtaattctgagactaattaaaccttctggctctgtctgaactcaggaacccaagaagagtaaacaaacagaaaagtatgtttttcattatatatgtgggaaaagcttaaggtagaaatactaggaagttatacaagagcaagaacttttctacattttgtttacccaagtgactaaaagaatacctagttcacaagtggagctcaattagtatttgttgagtgaaatgtcattagctataaactaatgtctccctaagaaaaaaagacattatggccaggcacggtggctcacgcctgtaatcctagcactttgggaggccaaggtgggtggatcacttgaggtcaggagatcgagatcagcctaaccaacatggtgaaaccccatctctactaaaaatacaaggattagctgggaacggtggcacatgcctgtagtcctaggtactcgggaggctgaggagggagaatcgcttgaacctgggagacggaggctgtagttagctgagatggtgccactgcactccagcctgggtgacagagtgagacacaatctcaaaaaaaaaaaaaaaagtatttttgtttccctcatagcaaaagtgatccatgcctactttagaaaattagggacctcacagaaaaggcagaaatatcttgtaatcctaccaccctgaaataaccactgttaagattttagcgtagatctttccagtctttttggctatgcatagatgtataataaacaaagatatgaccatattctccatatcatctataacttgctcttttgctttacagcctatcatcaacatctttccatgtcaaatatttttcaactggatcatttttaatggttgcataatatttaatgatatagatgtaccataatttactaattctatttttcaatcatttgttttttattttttgctattattagaacactgacaaacattcttagagctaaaatctttgcacacatccatgtttacaaacttagagtaaatccatagaaatagagttactaggacaaagatcatgcaaaatgataaggcatattggcaaatcactctccagaaaggctgctccagttcattcttccaccaatagtacatcacagtgtttgttccttgaatccctgtcaaccctatacaatgtaaattaagaaaacaaatttaaaccaatttaatcagaggaaaatgtgtcagtccatttttattaggaaaacacatttttccttaaaaacaaagttgcagagtcttttaaaaatgctttatattactcaaagtaagccaaagtctcaagagaataatctgagaatttcagtttcattacacagattcaaaggtaagagccagcttagtgtaacttacaggatgcctaatgcatgtttcttcatctaggaaacacatgctccaaaagcatatgccacagagtctggtgcaacggtcctaaaatacactcaaggcctagccacctcagatactccagctgcatcagagtgggaggctgcagtaactatcttcctgtgaaggaaacacctggtctaaatgttgctttgatccacacatcatctatttttttccccctgtgacttcaactcactactccccataaggtatatcaagaaaagtttattttgcaataagagctaggaccagtcaatttacttttacaggggtgtccaattttttggcttccctgggccacatcggaagaactgtcttgggccacacacaaaataccgtaatgatagctgatgagcttaaaaaaaaatgcaaaaaaatctcatcatattttaggaaagttttatgaatttggattagaattttaggaaagttttatgaatttgtgttgggccgcatgcaaagccatcctgggctgcatgtggcctatgggccacgggttggacaagcttgctttagaacatcaaagcttgatttaaggttattacttgaattaagactgctctgtactcttccccaaaatatacctgaaaatgctgtcatttatcgttgttactgctgtttggttttacttgttacttaggaatagataagtcaattgtctttaactgagccttagtcaaagggggtcataaatttcctgttttccatgagaaacttacctgcaaaatatgccctaactctaaaaatctggtctaaacacatgacctgaaactgtcctatctcaatcactgcaggaaatgataagacttaatttttcagtgagtctttggattccacccacctccatcctatcaattctgttttcaggggtagattatctccctggggtctttttcaggctcttttatttcttgttttgcttgcattctatccattccgctccccatggggacttctactacctaacaggcagctgaataggaaactgaaattcaaatccctgactggggaatggattctgaatcttagtcacatcattctctggttgtattagataattttctagataatctaaaataagagaataagaggccaggtgcagtggctcacacctgcaatctcagcactttgggaggccaaggcaggaggacggcttgaggccaggagttcaagaccagcctgggcaacacagagagacccccgtctccacaaaaaaaattaaaaaaaaaattagccaggtgtagtggcacatgcctgtagtcatagctgcttaggaggctgaggtaggaagaacactcgagcccaggagttggaggctgccataagctatgattgcaccactgcactccagcctgggcgacagagggagaccctgtctctttaaaggagagagagagagagatatgagagagagagagagatctatcctgtctaaatgtaagaaatactctcagggcagttatgtaacccatccaaagcatgttttctcacccataataaggggctaataatattattttgggggcttggtatgatgattaaatataatccatgcaaagcatctggcatgtagtaaatagccctgaaatgtccatatgccagctgatggttattagcaagtataatgttttctctaggctttatttgcattatgcaaatagccaccagcagtttaaatggaaatttatttatccataaagtaacgaatgctatccctggttaccttaggaaatagctaatgcaggccaggcgcagtggctacgcctgtaatcccagcacttcgggaggccaaggcggggtcaggagttcaagaccagcccagccaatatggtgaaaccctgtctctactaaaaaatacaaaaaaattagccaggcgtggtggcacatgcctgtagtcccagctactcaggaggctgacgcaggagaatcgcctgaacccgggaggcggaggttgcagtgagccgagatcgcgccactgcactccagcctgggcaacagagtgaggcttcgtctcaaaaaaaaaaaaagaaaaaaaagaaatagctaatgcatagcaatgtgatgttctagatttggctcttagtccactaactaacttagtcaatatgtccctaataaaactcggtatcaactggcttatctaaaccgttaagtctctgccagagcctaagaataacacctctgaattcctctgaatttcacttgttcaccaatactcaaggccttccaattgcaacaatttgaatattgcatttctaggtcatctttaactacgatggttatacaaacagatcatttagcattttcatagcaaactgtaccatttcaaacatttcttacaaaatattcctccaataacattaaaacacttttgtagagatagtaaaagtcatcttaccacattgcctgcacagatacaggtttgaatatgtgaactctgttatccgtcgatacactgaacccactaaggacaaatgagaacaagacaaaaatccacaaattagggtaggttatttgaattgtgagttttcatggatgtatcccaggctaaaaacaactggctccgtagagggaatcatcaggcatttcacgtagaagttttaactagagtgtaagacttgaccaaaaagctttgacaaattgtctgacttcatctaccaggcaaaatgaatggattcctatattggagttagagaattcaatacagtttcccagctgtagctatggacaaactgttctgtatatttctatttggaagtcttgtgggttcttagcaaacctgaccctggttttataaactggagcaaacatcttggtctcttggggacacattctaaaaacattaggaggtagggtgggggtggggtcactggaaggaactggcacaggaaaggggttatactgtaggctgacagctggcagaggcagcaagaggttatttgaaacagaacatatcatcctttgggagagcattgcaacagtcccacatactcagattaaagagccaacaaactagttcttctttgtcttgattcctaccacagtcggcctagaagaacagaagtgagagaccctggcaagttgtatttttactccactttacaaaacaggagtttaaaaggactcattcagctgttgacatgaaagttcagttggcacactgggcctcccttttagctgaatgaatgtgcagtaagatggagccccaccccttggctttctgtaacagaataaaaaaggaaatctcttacccatcaccatccaaatgaattagcgtgtcgctccagagaggcaaaactaagcccatggtacaagtgctactgcaagacaagaagtagtccaatagttactccccattactctgggaagcagtcttctgtttactaactctttcaacaccaaggataaacccttaaattctaaattctggcataagtgttacaatgaagaaatttctatcatattattattaatcttatgtatgtcctcaggagctgttttaaagagatagtcagtcagttccttaaatatttaatgaagaaaacttactgactcagcttcctacattgtcatcttgcaaatggccactatctaaaaaatgcagatgattgctgctgacttgcatttggcaggtcttagcacatagtacagtgtccacctcgactccaaggattttttttttttttttttgagatggagtcttactctgttgcccaggctggagtgcagtggtgcagtctcagctcactgaaacctctgcctcccaggttcaagcaattcccctgccttagcctccccagtagctgggattacaggcgagcgccaccacacctggctaatttttctgtacttttagtagagatggggtttcaccatgttggccaggctagtctcgaagtcctgatccacccacctcagcctcccgaagtgctgggattacgggcatgagccatggtgcccagtcccaaggattatttttaatgccaataactattgctggttgctggagagcttgggatgtgttatttgcctctaattctgaggtttacatagatttacttaacaccagaacacactcaatagtctaaaaggcaaagggaattaaaaaatgtaaagaagtaattgttaatagtttgtgatcaagataggcaaaatagacataacaaaacttaaatcaatgaaacactgctttgtgactgtgcactgaactagcactgctgaaacacagttaatagaaatgtcaacaaccaagaaaagggtagccctagtatggtatttaaaaatactatttctttttttttttttttttttgagacagagtctccctctgttgcccaggctggaggacagtggcataatcttggctcactgcaacctccacctcctggattcaagtgattttcctgcctcagcctcccgagtagctgggattatatgcatgtgccaccatgcccggctaatttttgtatttttagcagagatgagtttttgccatgttgactaggctggtctcaaactcctggcctcagagtgatccacccgtctcagcctcccaaagtgttgggattacaggcatgagccactgcacccggcctaaaatgctatttcaatctcacattagcccaggaagggctttaagttaatggaagaggttcgtacagaaagccatggacccctgattgtatgctctatcacatctcttctctgggaaacagtaacctaccctaggctactgccactatctctccttaacgctgctgtaactgctttcccactctggctagtctccgaaaggcttccatgatgctccatgccaatctatctagagcggaagcatggtgtactagaaagaatctggcataaccatactgtggaaaagcacagtatggttaagagctctggaacctgggttcacagtatgattatgggctctggaacctggtttcttgcactaactgtataatctttttttaaaatttatttttatttttttttttatttttaagatggagtttcactcttgttgcccaggctggagtgcaatggtgtgatatcggctcactgcaacctccacctcctggttcaagcgattctcctgtctcagcctcctgagtagctgggattacaggcatgcactaccacgcccagctaattttgtatttttagtagagatggggtttctccatattggtcaggctggtcttgaactcccaacctcaggtgatccacccgccttggcctcccaaagtgctgggattacaggcgtgagccaccgcgcccagcaactgtataatcttaggcaaattacttaactgtcttgtgccttaatttcttcatttgtaaaactgggataaaaatatcttcttcattgtactgttttgaagattaaataacaaataaaagagtaaaatagtgtctaagtgcctaaaatgtaatagtcattaccatttattgaacatctactatgccaaaagatctgggattgatttccttcagtattacaacttttttttaaacaaattatttaacctctctcagccttaatttcttcatcttgaactgtgaataataaaacctattctcatagatataggtataaagacataacatacttaaaataaaacaatatatgtgaatatactgtcctgtaaaacaaatgttgaatatgaatctgtaatgggtgctctaatatatctgaaagtgattgggggaaggggaaaccattatgctttaaaaacaacataatgaataccaaactttaactgttagtcactgcagggttaaaggaggctagcccttagttgggctttccactacacttgctggcctgtgctgcttaacaccttaagagtgattccaggccaggcacggtgactcatgcctgtaatcccagcactttgggaggccgaggtcaggagttcaagaccagcctggccaacatggcgaaactccatctctacactaaaaatacaaaaattagctgggtgcaggggcagacagacacctgtaatcccagctactcgggaggctgaggcaggagaatcacttgaacctgggaggtggaagttgcagtgagctgagatttgcgccattgcactccagcctgggagacacagcaagactccctctcaaaaaaaaaaaaaaaaaaaaaaaaaaaaagagtgattccagagctcaggagattcaaatcaagactgaaacagcttatccacattagaacctggacctgaacaacagaaacacagctaccatgccagagtccaggagcaagacagctctaccacaagttttgttgagtagatgagatgagcgcacaaaaaaatttgttttgaaaacggcttcccaagatgaagtggggatagttttacagtagctttttgttttgtatttagtgagtgcttagccaggttcttagcaacaagtataattttgagtataaatatggtgggttggtagcccaatgacaaatctagaaattaactatataaaaagatacagaagctgcaaaagagtgtgatctataagcttgtgaccagattttggttaacctttggacaagtgacattgatatacaggaatcgacattacatttttggcttgtattcaggccagagtgcttttttacattaagaagtagctttttcagcagggcgtggtgcctgtaatcccagcactttgggaagcagaggcgggcggatcacgaggtcgagatagagaccatcctggtcaacatggtgaaaccccgtctactaaaaatacaaaaattagctgggcatggtggtgtgcgcctgtagtcccagctgcttgggaggctgaggcaggagaatcgcttgaacccaggagacggaggttgcagtgagctgagattgcaccactgtactccagcctggccacagagtgagactgtctcaaaaaaaaaaaaaaaaaaaaaaaaaaaaaaagtagctttttcacgcaacaggaaggaaaggactgaataaggcacgcttggtatttttatccaggttacctcagtctctcaagatttttctccatttaagtataactacttattttagtaaatattcaattcattcaataaaaatttatttagtgcctactatgtaccagacatttcaaggtgttaggggtacaaaaagaaatggaaaaaaaaaaccccaaaaaaccatgaagctctattattttataacttaaaatatgttacactttagaaaccaagattatgctgcatatttaaaaaattattaaaatataacataatactcaaagaacttgtaaatgggctaaatgaattggctgcaacgtattattaagaactatttgtacttgtcataatctgggttccactttggcttaatactattttgaagcattaacatttacattctcagatatgaaatgatacaaattcaaattccttcaacaacaactgagacagaaatgattttagattacctgagcatctgagacttcttactgtccaaggaactcattaaagcagaggatgtatgggaatttcataatagcaagtttagcaaacagaatgaaaactagtttctagcttttcatgttttaagtttgtcttctataaactataatttcctttggctagtgacactggtcagatatgattcagacagggccattggcaaaagatagatgtaatttactgagtataaactactggatacctatattaatatgcattctttctggtaaagtttaggacaaagtgaaagagaaatgattagacatgtgcttgctcatattctgggtcaggagaatctgcagttattgtcttctgtctctaggggaagattcaattgaagcttcatgaggttcctgttcctgttttatagggttttcaagggagggggtcagggagaactgaacaaaggaaatatgagctagaacagtgctgtccaactgaactttctgcaagaatggaaaatgttctatacatgtactgtctaatacgatagccactagcacatacggttactgaatacttgaaatgtgactagttagaactgaggaattgaaatttcatttaattttaatctatttaaaaagacacgtgcatgctgtatgcagtggctcatgcctataatcccagcactcaggaaggcagaggcaggagctcaggagttgagaccagcctgggcaacacagagagactgtgttcttcacaaaaaggaaaaaagaaaagaagagaagagaaaaggaaggaagatgaaagaaggaaggaaggcaggcaggcaagaaggaaggaaggggcacatatggttagtggctactatactggacaacacagatctagaaagattaaaaacctaaattagaggtcctaaaatcctaatgaatgtaaacaaggtaggtgctgttataggaaaatgcttactgaaagctctgttgcttaatcagaagttaaaaccatgcaggagaaatcttcctaaatctggtttacaagcctgtgtaaattcagagcctacaattaaatgctgttaagtggtatacaagctaataactttggctttgggaattcctgtgaacccccaagtcattttcaggttgacttctatataggaataaggtaaacattggtttgggaaactttctagtgacaaagtgattttttcccctcaacatcaggaaaattagaatcattcccaggctcctcctctctttgtggctaaatttccctaggcctgggtcacacccctagctaccccatagttccattctaatcctgaaccaggaagtcaatgctttgagacatctggcaggatttcctgaggctaattatccacagcgtaaagatctgcttagcagccacattccaaagtcttccgaaggtttctccagaaaaagtgggaaaaataaaaaaggaaagcaacaaaccttaaggacacacgaaaaggccaggtgttgtgtgtcatctttcatcatagaatgtaaagtacagctaaagccaaaggtacataaaaagttctgctttgagtttaaggagccatcccgtaccaccccatccccgccccgcccaccatcctttttaactcaatagaaggaaaaaggaggcatagcatttggtaaaagcaaggtttaaacaaaacagactgtagtttaagtgggatctctttgtatctgggactactggtatactaccacaaagggtaggtgccctagaatcaccaaagtgaatcattactgactacaatagagtaggccaggtgcaaggctcatgcctgtaatcccagcactttgggaagccgaagtgggaggattgcttaagcccaagaattcaagaccagcctggccaacataaggaaatcttctctccagaaaaataaggaaaaaaaaaaaaaaaagaccaaatagctgggtatggtggtgcatgcctgtacttctagctacttaggaggctgaggtggaaggattcctagagcccaggaggaatttgaggccgtagtgagctgtgactgcatcacggcacttcagcctgggcagcagagcgagacgctgtctcaaaaagagaaataaaaaggcagctttttttccatggaaatgtaactttgaaaccacttgctttatattgtgactatctaaagatgagatgaaggtatggaataatggtaaattggaaacacacgaccaaagacattcactaaacattcttgtttctcaagactgtggctaagatacttatgttctttagttttatgtcttgtactttaacagcagaactgcacaagatatttttgtgataaaaggcaactggggccaggcacggtggctcacgcctgtaatctcagtactttgggaggctgaggtgggtggatcacttgaggtcaggagtttgaaactggccaatatggcaaaaccccatctctactaaaaatacaaaaattagtttggcatagtggtgtacacctgtaattccagctactcaggaggctgaggcaggagaatcgcttgaacccgggaggcggaggttgcagtgagccgagattgagccactgcactctagtctgggcaacagagtgatgacactccgtccccattaaaaaaaaaaaaaaaaaaaagcaactggaacaggttacttaaaaagcagttttcacattttgaaatggtaccaccatacctgtcattagaggagaaatccattcctaggacgatgctttcttcagtgtcttgtctaccattagttgaaaccactaccatatagcgtgttcgattctggtaagtactttccagtcttacagcctggaatttagcagacaacagagaaattatgaaatttaggacattaatttcagatcatttcaaccctttttcatcagcatcttaaagcatactcacgaaggcagcagagccagtagttaggagacataaattaaaatctcagctcgtacactagctataaaaactttggtaagttactaaattaattggagggagatataataatacctaactgtcaggttgttttaagaatcttataaaataatacagtaaagcacagtgcttggcacacagtaaatgctcaataagatgtttgttattagtgcaatttatactaattaccacagtgtgtaataaagactgaagagggaaatgtgaggtatatgaatgtgagcattggtctcagagatgcaattcccacaaacaattataatatggagcaaactattagcatcatctaaggggagtactgactttgctatactgaattcctgcatgttaatgcactataagattttcttcagtttcgatgataatgaaaggagattgcatttttagaaacttctcattttttgtcaaaagttttaatttattcttaattaaattttaaaaggaccctcagaaaatctgaatatggacagggtcttagatgaaattaaggatttactgttaatgtaataacagcattgtggttactgtgactttttcttaagtacctggagtgaaatgacatggtttctgagttttactttaaaatgttccaacaaaaaaatttaacagggagtggggacagatgaaagaaatcagacaaaaggttgatggttattaaagctgagtaatggccaggcacggtggctcatgcctgtaatcccagcactttgggaggccaaggtaggcagatcaccagaggtcaggagttcaagaccagcctggccaacatggtgaaacactgtttctaccaaaaatacaaaaaaaattagctgggcgtggtggcgcacgcctgtaatcccagctacttaggaggctgaggcaggaggatcactggaacccaggaggcggaggttgcagtgagctgagatcaccccactgccctccagcctgggtgacagagtgagactctggttcaaaaaaaaaaaaagctcagtaatgagtttgtgaggatgtactttctttctttcttttctttttctttttttttttttgagacagagtttcgctcttgttgctcaggctggagtgcaatggtgtgatctcggctcaccgcaacctctgcctcccgagttcaagcgattctcctgcctcagcctcccgagcagctgggattataggcatgcgccaccacatccagctagttttgtatttttattagagacggggtttctccatgttggtcaggctggtctcaaactcccaagctcaggtggtctgcccacctcggcctcacaagatgctggggtttacaggcgtgagccaccgcgcccagccttgataagttcaaaaaggtatcttataagccttaaaaataaaacaactacaggcaacacattcaaatatttattacacatatattatatatacaataacaatgccaagtgctgaggattcagtggtagaagagagagacatgatctatgccctcatcgagttatatagtctaggctactcttctttcatttgttaataatagttttaaaatgacagtttttttttttttaagagacggagtcttgctctgcctctcaggctggagtgcagtggtgtgatctcggctcactgcaacctccacctcccaggttcaagcaattttcctgcctcagcctcctgggtagctgggactacaggcacatgctgccacgcccggctaattttttttttttttgtattttagtacagatggggtttcaccatgttgcccaggctggtctcgaactctgaactcaggcaatccacctgtcttggcctcccaaagtgctaggattacatgcacgggccactgcacccagccttttctttttgtttttttgagacagagtctccctctgtcacccaggctggagtgcaatggcgtgatctcggctcactgcaacctccgcttcttgggttcaagcgattctcctgcctcagcctcccaagtaactgggattacaggcacatgccaccatgcctggctaatttttgtatttttatagagacagggtttcaccatgttggccagatggccaggctggtctcgaactcctgcctcaggtgatccacccacctcagcctcccaaagtggtgggattacaggcgtgagccacccacctggcaaaatgacagatctttgaagccagaaaaatgtgctctggaggcaaattcttctgtataaaataacccctattccttagagaaacagaattctaatccatcaactggctcattatatttgtcagaaatttctatttggaacttttttttcagtgctgctgttcttggagtctccctcctgttaactctgtcaccattccaaaatggccaggccaagggaaaaagaggcatagttacacggctcaaatgacccatttagcaaggcagaggtgagactcccatggctatctttttgtctctattctgatactcctaggaaaagctagggaagcacaaacagcagaagtggctacattaaatcttgtttctaataagaacggatataacaagaatgtaatgcttaccattctgatgccaaatgcataagatagagagctgtacttttgacttcatgttccatgaagtaattgagcatttaaaaccaaattcacttatgagaagctaagcggaactaacatttaaatggactaagatctagaaggctgggatcaagggtgggatattatacacacagaaaaatgaataaatagtaaatgtacatgtggcagaccgggaggcagtactgactccttctctgattgtagaaacactctacaacatgttaattaatcacaaatcctggtgcaggtaaactggattttcttataaacaagatctcgcatattattacatatttatatttgggcctcccttggcccaagtttcctgaatgtgttagaggctcttttattctctgtcaacgctccaagaatttctggcaaggctcaaatacaaatggcctgggaacaaatgaactttgtttctgacaatttatttacagctcctacaccaaccagtggcaactgattggctaagtcaaagctgataaaaggaaaaatataactttcataagtattatctataatgcaagttaccagccaagttagaagtgggctgcaagagtttctttgtaagtgatattcattgcaaacattagtgtttttttttttttatttttcgagatggagtctcactctatcgcccaggctggagtgcagtggtgtgatcttggctcactgcaacccccgccccccgggttcaagcggttctcctgcctcagcctcccaagtaaacgggattacgggcacctgccactgcgcctggctcatttttgtgtttttagtagagatggggtttcaccatgttggccaggatgctctcgatctcttgaccttgtgatccacccgcctcggcctcccaaagtgctgggattacaggtgcgagccactacgcccggccagatgtctctttaaagtttattttataatatcaaaagcatttcaaatgtttggctctcccttgcttactcaaactgtaacagaagttcccaaacctaatgagaagggccccagacatttaatactgacttaggcttgaataacatgcatatctcagatccattcaattttaagcttcttttttgtttttgtgtttcactctgttacccaggctggaatgcagtggtgtgatctgcaacctctgcctcccggggtccagcaatcttcccacctcagcctcccaaagagctgggaccacaagtgcccgccaccatgcttggctaattttttgtatctttggtagagatggggtttcaccatgttgtccagactggtcaattttaagcttcttaaatggaagaatagcacttaagagttcctggaatttgatcacaggcctctagacagtacctacagtattgattcaacacctatatcctaattagaaggatgagataaaaatctttgaagaaaaaattctgaaatgtgaggggataaacccaagactttaattaaagttccttttaggccgggcgcagtggctcacgtctgtaatcccaaaactttgggaggctgaggcaggtggatcgcttgaggtcaggagttcgagatcagctggccaacagggcaaaatcctctctctactaaaaatacaaaaaaaattagctgggtgtggtggcatgtgtctataatcccagctactcaggaggctgaggcaggagaattgctggaacccaggaggaggaggttgcagtaggttgagatcacgccactccactccagcctgggcgacagggcaagtgagactctcaaaaaaaaaaaaaagttccttttaagcttcaagattctaggttaaggaattaaaaatctatgtgccgcagccataaggaaaagtctaacgcccatcctggtttaaggtttatttcgtattcctctgttggagataagattaagcaaaatctaataatttattaacacaatcaaataaatttaaaatggcaattttgtacataatatcctaattttgaaaaggacagcatttccaatgtttcttcagtctccagaacctatattgaaatcaatgactggaataagacaataattgagatgcatttgatttatcaactaaagttctccttgaaaaggacactactgaagtccattttaattgtctaaacaaaacaattattctggactttaaaacttggcagcaatagtaactaagattatatttccaagaaactacatttactgcctaaatgtggaatcctattacaagttacaggtgaattggatccagcaatcttaggactgaagtaggtctgagaagtcatcccctgcctctttattcctgaagaacccaatctgttttcaaagctcatctattaaagaataatgctattccctcggcatccaatttaaatgtttaacctaattacaagcagtttacaaactgggcatagtggcatgccagctactcgggaggctgcagtgggagtattactaaaaatacaaaaattagcagggcatcatggcatgtacctgtaatcccagctactcaggaggctgagtcgtgagaatcagttgaacccaggaggcagaggctgcaataagccgagaacacaccactgcattccagcctgggtgacaaagcgagatccatctcaaaaaaaaaaaaaaaaaaaaaaaagagcttctctcctcagcatcatctaacatcaggaaatactcctccttaagcttaaactgtaactttgcctttaatttcttttcaccactgggtgcagtggctcacgcctataatcccagcactttgggaagccaaggcgggcagatcacctgaggtcgggagttcaagaccagccagaccaatatggagaaacccggtctctcctaaaaatacaaaaaattagccaggcgtggtggcgcatgccggtaatcccagctactcaggaggctgaggcaggagaatcgcttgaacctgggaggcggaggttgtggtgagccaagattgcgccattgtactccagcctgggcaaaagagtgaaactctgtctcaaaaaaaaaaaaaaaaagacttaatttctttacaccaagagtcttacatgcatgcccctgtgtgcatgatgtaagactcttggtgaaaagaaattaattacccccagtaaactacattataaaggcccaatgtctaagacaggcagttcacccaatccatcagagagaaaggttccaaaagtaggtaaatattaaatgctagtcaaaagaatgaagcaaaatcaatagccaaaattaaaacaggcttcacttgtgacactagtaaactaaagaacactgtcttcaaaagaaaaagattagagcttcaggaagtctctgaatttttttttaaatcagtctgtatgaaattcttaaatatgaattatattctgtgtagccattaaaaaccatgatttatttattgacatggaaagatatccatgataaactatgaagaaagtaggttacaaaaaggtatttctatttttatcacattttcgtagaaacaaaacaatgctcttcctctcactctttacacacacacacacacagacacacacacacacatagacacacacactctctctctcatatatacatatttaaaaaaagagtggaaggatacttatccaaattgctgagaacgattttctcagaatgtagaatacagagtgatttttattttatttatacctttttgcattgtttgggagaaaaaaaaaccccacataatacatttatagctagaaaaaatgaaccaatttccattttagaaagcaacatatgatgaaaaccaaaatcataaaacttctcattttcttgaattctcctgcaaaatactcaaaaaagacctctttgtaccttatcaacacttcagctttagttaagaacatcaattgaaattacttcaaatgtcctgaaaattcttaatttctcagattaatgttttaattaaatggttgatctttggtaacgtgcaagagtactataaaaccactttctttattttactagctacagtttttctaagtactacagttaatgcttgatgcctgtatttggaacacagagcttccctggaggaaaagattggctttgtcctattttctctctttttttttttttgagacagagtctcgctctgttgcccaggctggagtgcagtggcacgatctcggctcactgaaagctctgcctcccgggttcacaccattctcctgcctcagcctcctgagtagctgggactacaggcacctgccaccacgcccggctaattttttgtatttttagtagagacggggtttcgccgtgttagccaggatggtctcgatctcctgaactcgtgatccacccgcctcggcctcccaaagtgctgggattataggcgtgagccactgtgcccggcttattttcaatgctaaagcaaaatgtgtggtttggttgggttatttaaaaaatgaagtcaagactttcagccgggcgcggtggctcatgcctgtaatcccagcactttgggaggccgagatgggcagatcacttgaggtcaggagttcaagaccagcctggccaacatggtgaaagcctgtctctactacaaatacaaaaaattagccgggtatggtggcatgggcctgtaatcccagctagtcggggggctgagacaggagaatcacttgaactcgggaggcagaggttgcaatgggccaagatcgagccactgcactccagactgggcgacagagcaagactctgtctcaaaaaaataaataaataaataaaaaataaaaaaaaaaaaacaagactttcagttgactatcaaacttttaaccttctgcacaaatcttcagagtttcagcattacaaatttaactcaaaacaaaagcctttgctttgagtctacaaatgctcctttcagttacagaagtgctaatttgtccaaagtcatacaatgcattgactcattttcttgaagatgactcactcaataagctgaaacataatgactatgtgtttgtaacaactcaaaacaactgtaaaacggcttgtcatttgaactttgaattcagaggcatcagttacattttctgaatttatattttataaatgtaaagcagctgaagatgcatattttagtaagaaaagaattgccagctctgcctttgtaactgcttccttcatgttcttccaagtctctatgtagttaaaattattttaatatttagaggttcaaaccaaattccagaaggttatcaatgagaaaacgataaagtgatgttagatctctttaaagctttagctttaccaaaacacacaaatgttgaaagctatcagcaaatatttattgggcatccagtatgtgcaagtgactgttgttatgggttttcaaagaggtgtactccaagtgtgattcctggatcagcagcatcagcagtgtttcgaaactggcttaaaaatacaaattatctctgcttcccctttactaatcgaactctgcatgtggagtccaccaattggtgatttaacaaagctctccatgtgattctgatatactttaaagttggagaatcattgcttcagatgatgatgatgattattattagagggtcttgcactgttgcccaggttgagggcagtggcgtgatcatggctcactgcagccttgacctgccaggctcaagcaatactcccactgcagcctcccgagtagctggcatgccactatgcccagccaattttttactttttgtagagacagggttttgccatgttgcctaggctggtcttgaactcctgggctcaagcgatcctcctgccttggcctcccaaagtgctaggattacagacatgagccaccacaccccaatcactccagattattaatactgtaagaatagcatcccccccgttcccttttaaataataataataacattattattattttttgagacagaatcttcttctgtcatccaggttggagtgtaatggcacaatctcggctcactgcaaccaccgcctcttgggttcaagtgattctcctgcctcagcctcctgagtagctgggactacaggtgtgtgccaacacacctggctaatttttgtatttttagtagagacagggttttaccatgttggccaggctggtcttgaactcctgacctcaaatgatctgcccacctcggcctcccaaagtgttgggattacaggcatgagccactgtgcctggccttagataattatttaagaaagaaatatatcaagaaatacagacaagatttatataaatgtataatgttacttttggttaggatataaaacatttaaaaaattaaaattaagatataaaataactatgaaaagattcctttaaatttttatatattctaatcaaaggactcattaccacatacctagattactgcaataactaccctagcaggcctccctgatttaaaatgatcttttcctcctctctattctgtattagcttctgaggaatcttccctaactactatagctgtcccacggcattctttggctcaaaaacctgtaatgtttcacaagtgcttattgaaaagggagaggtactacctttagttagtaatctagagcaggcagcaagcttgtgcaacccgtggcccaagatggctttcaatgtggcccagcataaattcataaactttctgaaaacattatgagatattgtgattttttttttaagctcatcagctatcgttagtgtattttatatgtggcccaagacaattcttctttttccagtgtggtccagggaagccaaatgattggacacccctgagaggctcagatgggaaatgtaaataaggaaagtaagccacgtgaatattgaatgggtagaaatactttccaatttccacaaagaaatatggtcatctcagttttgttttcctagttttattggaggtattactacaacagtgcaggaatgatgacaaatggtgacacttgacttaagaagacaataggggctgggcactgtggctcacgcctgtaatcccagcactttgggaggccaaggtgggtggatcacgaggtcaggagttcgagaccagcctgtccaatacggtgaaaccccatctctactaaaaatacaaaaattagctgagcatggtagtgtgcgcctgtagtcccagctgctcgggaggctgaggcaggagaatcgatcgaacctgggaggtggaggttgcagtgagccgagattgtgccactgcactccagcctgggcaaaagagcaagactccgtctcacaaagaggattatggtaaattaagaacccatgctagatctcacctaactttaaaattctggcttatgtttttttaaaaaaacactgtgatccaaacaaaatgtatctctggcctatacactgccagtttgagacctccagtttacagcactaaatccatatttgcctgccttgttttctagtctctatcttcccaataatcataataataatccccatacttagacagcattttgcactatgcagtatgttttcatgtccagttgaccctctcaacgtgagaggtagtcaggagatgaggaaatgggcacagacagggtaaagtaacttgtccagtatcgtatgattagtaaagacctaagtccacgtctcctgagtctgaagccagcatcaatctttggccatttcactccctccttgtccttccctatgtgtgtttttgcttgttaagtccttatctagaataatttctttctaccaatccaaatctcatcatctttcaacagtcagctcaagctccactgactacataaatcttcctaatctaggtcaaatccccaaggtttttctccattttctgaacttcaattgtaattatagttaataacttacaaattggtgcttaccaacagtcttaaaccatcaaattatttcacaacactccacattatcttctctcttacttcacatagttcccagcactgtgttgggatgtaaaaatgactgttcaattttggctatcttagatagtcttttgaggaagaaaattatgatgacaccactaacttaccagcctgatgttgtcttctgggcggagtaaaatgaacattgcttggagatgctgttggagatcgcctggtgaaatttacaaaccaaaggataattattctccattctaatgttgacagagaggattccttctactttagtgacttttgtaaaagaaagttctgattcattaaaggactctaattagacatagaaattaaatgattattaacttcttttaaaatggaaagacagactgctagactgcatcttaatacatttgcttttagtctatactacattaaaatttatgtctgttctatgaaaggtacacttgagaccagtctcagttttgtattatggtggatgttcatgagagacttgttggtgagatctgttaggcagaggtagcacccactggctgtttttgggcccactgaaggtagcaatgagggcactttgaaaatgggtgtagtagtgtagtgttagaggaattatccataacttttaaaaagctaaccattttttcattcctatttctataattatatgcttcggttgcatttgacctaggaagacttttggattctccctagaataaggtcaatagtttaaaatgattttcatattagtgactgatattattattatttattttaatttttttgagatggagtctcgctgtcacccacgctggagtgtagtgactgatattataatgagagtatgtatatatatacacacacacacacacacacacacacacacacacatatgtatatacgtatacatatacacagagtgagactccgtctcaaaaaatatatatatacacacacacgtatatatatgtatatacacatgcatatatgtatataaatatacatacatatatacacatatgtgtgtatatatatactctcataatatccatacatataaatatatatttatatttatacatatccatacatataaatatatatacacatatatgtgtgtgtatatatatactgtcattataatatcagtcactacactccagtgtgggcgacagagcgagactccatctcaaaaaaaaattaaaactcatgctagagcttgcagagccaagattgcgctactgcactccagcctgggcgacacagcgagactctgtctcaaaaacatatatacatatatatatacacacacacacacacacacacacacctatgtatgtatatatatacgtacgtgtgtgtgtgtgtgtgtgtgtgtattttttgagacaagagtctcgctctgtcatccaggctggagtgcagtggtgcgatctctgctctgcaagctccgcctcccaagttcacatcattctcctgcctcagcctcccgagtagctgggattacaggcgcctgccaccatgcccggctaattttttgtatttttagtagagatggggtttcaccgtgttagccaggatggtcttgatctcctgaccttgtgatccgcctgcctcggcctcccaaagtgctgggattacaggcgtgagccacagtgcctggccaatgagagtatatattaagtatgccacataagggatatatattctcctgaacatattattaggttctttaaaatggccaaccattatttgaatcttcacttgttcttatacatcttgtcaaactaagttgaaatttctttgttttaactattatagatttcctcatattcctaggaaatctgaggctttagatagcaggagataaataatgtactatcataaattatgaaaatctgtgaacaaaaaaacctcattcttgcccactcagatcttgcccttattaaagtctaaggtgactgacatagtcacataaccatgaatgccagtataacttgttctcacattggtcttgaaatctacataattttccttcagttaactaatagctgttaattatgagatgaaatactgttatgtacaagaagtggatagaggcaggaagaaaaaaaaataggttggcaaacgggttggtgcgtttgtctaaatggtcagcaagtctgaaagcctttcctttcttctccctctttccttctcatacagaatagttttcttaatctcagcactttgggaggctgaagcgggggagtgcttgaggctagtgagctatgatcatgccactgcactccagcctgggtgacagagcaagaccttatatttaaatataaataaataaacaaaaaccaaacaactcccccaccccaaaccaaaaaggatggttttcactgctggcttctgaccaattaattccatattgcagaatctttcaattttcaaaattaaaatggagagtcattatgtttggccagatccattctactacatttcaaggccagggacacaatctaagtctcatatgcacaaacccaagagaaatcaaaacgtatgtccacccaaaaagttgtacacacatctataatacagcattattcataatagcaaaaaagtggaaacaactcaaatgtctatcaaatgatgaatggataaataaaatgtggtattatccacaaaatgtaatattatttggtcataaaaaggaatgatgtactgatacatactataccatggatgacctttgaaaacatgctaagtaaaaggagcctaactcaaaaatccattcatatgaatccatttacagaacatccagaataggcaaatctatagagacagaaagtagattagtggttgcttagggctggtagagagggtgagagaaatagggagtgcctgctaatggacatcgggtttattttcagggcgataaaaatgttctaaaattagattgtggtgatggctgtacaactctgtgactattctaaaaaccaatgcatgtacactttaaatgagtaaactgggtgaattatatggtatgtggattatatctcaataaagctgttaaacaaaaaataaaagaacaagtatgaggagacaaagtgttaggtataaacagtgaaaagctaccggagttacaagttgcaactgagttaagcaactgaggatactttttattttatttttttcttgagacagggtcttactctaccacccagactggagtacagtggcgctatcacagctccctacagctgtgacctcctgggctcaagcaatcctcccacctcagcctccagggtagccaggactaactaccctaggtgttgtgcaccacaacgcctagctaattttttgtattttttgtagagatgaggtttcaccatgttgcccaggctggtcccaaactcctaagctcaagcaatctgtctgcctcggcctcccaaaatgctgggattacaggcacagaccactgcaccagggctgagcttctttaaaattaagtttccttctgtcctaccagtagaaataaccagaggaaaggatttttaggatggagaacttctggaggagaaccctaaatagcagcccaaagtccccactccaaacactactggcccaaagattcagctggcttatttgaagctcagacaaaaaccaggagtcctactcaagtaagccttcttatgcgagttggaagctcaggtttgtcagctgcaaaaagtacttactgctctgagcaaactgcatatcatttcctactgggcaactgttcttcacagagtctaacagaaggcaatatattgatatagcattaagataaccttccctacatttccctaccatatacttcatttctaggagctaaatttcaaatttctattggattttatagacttttcattgtttccatttaaaatactggcagacattcacccataatacccttttttgattgcaaaatagtatttggatatttcaaatgcagcccagttaaaaaattctaactagttcaagaaacatgcataaggaagtacaactagacaaggtaagcccttgatctgctctcaattctgccatcaacttgcagttactgtgggcctggccaaggcagcttcagtttatgtgacagcctggcttttacaagctgagtttatactcgcactgcctcatctgttccggtctggatcacaagcaagtccattcagcttgtgttaaatctgcttttctttttagtatgaggaaagctaagtgaacaatgtcaagtagaaacctgggtggcagctgagtgtagaagtttgaccaaagaaaaatgccaaccagtgccaggagctttaaaagccactgaccccattaactatcacatgccatagagtaatttgcccaacattctagtcagacaaactggatttaaaccaataatttgtcttctttttactgtaagggataaatatccacactgaaaagaaataaaaagcttagtgggcatacttcatctgcacattcaagttttttggggaagtgtcctcccctacccgacctctggtactgggcactggggaggaaggttttagaaagtgtaatccaagctaatttccaaaagaggttatttcttcccttactctaaaaaattttccatggctggagagttctggtaggaggaaaatattgtccaaacaaaatggattatgattctgagctgccacagttgcaactaggtgaaggcccaaacaagtagtagggcagccactaaaacagccgagattatcttgactaaagctatgctcaactactggctcaatgggatccaatatttttggcttttacctctgacctaaacacttaaggttatcgtagtctttgttcctttcttagtaattacaatttttttcactcctggaggtcataagtggtcaaagtggcccatttatgacaacaagcaatcacctctttctgtactactgatcaggattagtgtcctcaggctgacttttattttttttccccaaaatgataaataaggtctgccagtagaagagaagcattaggttatcttcttaaactgtggatatcctatacctggagatctctctccctaagacacattttctacggttcttttaaaacctcatcatcacaggtgttcctgattttagagaaatccaatataaaagaatacagtgcatatactactgttagttgatatttcaaaacaagagtcttatactcattcctatgtgaacatttgatgattccttctgggttgaatttccagtctttttagtgtatacattcaagtagcagacactggcattttaatatgtgacataatgactcattatcacagcaaaaagtttatcttagtatattctgtatcattcccctcctcataccatcaccagacagtagaaagaaatcagaaattgaatctttgattagttgaagtaattctgaataagattcaagggaacagctaaacttctttttttctttttgagatggagtctcattctgtcgcccaggctggagggtagcagcgcaatctcagctcactgcaacctccatctcccaggttccagcaattctcctgcctcagcctcctgagtagctgggactacaggcgcgcaccaccatgcctgctaatttttgtatttttttctttttttctttttttttgagatggagtcttactgtgtcgcccaggctggagtgcagtggcgtgatctcagctcactgcaagctccgcctcccgggttcacaccattctcctgactcagcctcctgaatagctgggaccacaggcgcccgccaccatgtccggctaatttttttaaatttttagtagagacggagtttcaccatgttagccaggatggtctcgatctcctgaccttgtgatccgcccgtctcagcctcccaaagtgccgggattacaggcgtgagccactgtgcccggcctaatttttgtattttttatagagatgaggtttcgccatgttagccaggctggtctcaaactcctgacctcaggtgatccacctgcctcggcctcccgaggtgctgggatcataggcgcgagccgtgcctggctctttttttttttttttttttttttgagacagggtcccactctgtcaccaaggctggagtgcagtggtgcaaagagggctaactgcagtctcaacctcccaggctcaagtgaccctcccacctcagcctcccaggtagctaggaccacaggtgtacaccaccacacgtcactaattttctttttttgaagtggagtcttgctctgttgcccaggctggtgtgcagtggcatgatctcggctcactgtaaccttcgcttcccaggttcaagtgattctcctgcctcagcctccagagcagctgagattacagcagtgtaccactacgcccagctaatttttgtatttttagtagagacagcgtttcaccatgttggccaggctggtctcgaacttctgacctcaggtgatccacctgccttggcgtccccaaatgctaggattacaggtgtgagccactgtgcctggccacatttggctaatttaaaatttttttttttttttttttgtagagatgggatttcaccatcttgcccaggccggtctcaaagtccttgactcaggcaatcctcttgcctcagcctcccaaagtgctgggattacatctgtgagccaatgtgcctggcccacctgaacatttttaatctgaacactcaaaaccttaactgagggctgggtgcggggactcacacctataatcctagcactttggataactgaggtgggtggatcacctcaggccaggagttcgacaccagcctagccaacatggtgaaacaccatctctactaaaaacacaaaaattagctgcatgtggtggtgcatgcctgtagtcccagctacttgggaggttgaggcaggagaattgcttgaatccaggaggcggaggttgcaatgagctgagattatgccattgcactctagcctgggtgacagagtgagagtctgtctcaaaaaaaaaaaaacaaccctggccgggcgtggtggctgaagtctgtaatcccagcacttcaggaggctgaggcaggcagatcacctgaggtcaggagttcgaggccagcctggctaatgtggtaaaaccctgtctctactaagaatacaaaaatgagctgggcgtggtggcgggcgcctgtagtcccagctactcaggaggctgaggcaagaggatcgcttgaacccaggaggtggaggttgcagtgatctgggatcgtgccactgcactccaccctgggtgacacagcgaaactccatctcaaaaaaacaaaacaaaacaaaacaaccccaatcttaactgagaagttccatataacttcattattttggtaccgtcttattattattccaacaaaaatgtattgaacatctactatgtgtaaaaggctttttgcgaagcgctaaaaaaattggtctgtgagggtaaaagtcattacggccctgtacaatgctttctttcaccattaaagaacttctgaagagatggggatgaggtagtcaaccttttagaatgtaacaaaagatatagttaccaagaaagaaatggtgtatatgcaagcattacctgcatgcttgttccgtctgtggctgattcttggtgtggatgagccatttccccgtggtagaaaaagggcagcacctttgacagttagaaagctctcgctgatgctacaaggaaaaagtcaaaagaaaataaattacttaggaaaggaaatcaaagagtaggatggataaccacttttggattctctcttctctattccaaagtcccaacttcatggaacgaagtaaaaacataatcaagagaggctgtggttactcactcatacgctcctgtctactctagacaagtttgctttctttttcttttttgaaagggagtcttgctctgttgcccaggccggagtgcagtggcgtgatcttggctcactgcaacctccgcctcctgggttcaagtgattctcctgcctcagcctcccgagtaggctgggattaccggcgcccgccaccacacccagctaatttttgaatattagtagagagtgtttcactatgtaggtcaagatggtctcaaactcctgacctcaaatgatccgcccacctcggcctcccaaagtgctgggaatacagacgtgagccactgtgcgtggcctctagacaagttttctgaaacaaaactttacaatattctttttttttgagatggagtctcactctgttgcccaggctggagtgcagtggtgcgatctcggctcactgcaacaacctccgcctcccaggttcaagtaattctcctgcctcagcctcctgagtagctgggattacaggagcgagccaccacgaccagctaatttttgtatttttaatagagatggggttttaccacgttggccaggctggttttgaactcctgatgtcatgtgatccaccagcctcggcctcccaaagtgctaggactacagatgtgagccactgcgcccagccaaaacttacaatattctatatacattacatggcagcagttaagagcgcaggctctgaaaccagaatgcctgagtttgaatcctggctttacttcttcctaatagagtaggcctaaatttccttatctgtaaaacagggataataaaatgaagttgttgtaaagagccaatgagaacagagcttcttaaagtggtgcctagcatacagtaaaaagcccttaataaatattagttattataagtagattagtagaaggttatcagtaatgatgtttcaataccgtcctgatcagatgtgaagtatgttacaatatttagctactagtaataggtccaaagtttgcaaaaaaaatttgtttaaaatatacacaacagtaaaatgttacctcaaaattttactactgccaacttgtatccccatactcagtgaaaagtagtaggcaggaagtgtgtttaacctacttgagtttgtcattcacaagatgataatataggtggagaattactgctgaggatagtaactattcaaaatacaattactggtctggtcacagtggttcatgcctgtaatcccagtgctttgggaggccaagccaagaggattgcttgagtcttggagtttgagaccaggctaggcaacacagtgagactccatctctgaaaaaatattttaaaaatagctgggggtggtatcacatgcctgtagtcctagctattcaggagggtgaggtgggaggatcacttgagcctaggagttcgagattatagtgagttatgatggcgccattgtactccagctggggcgacagagcaagactctgtctcttaaaaaaaaaaaaaaaaaaaaagcaaaacacaaaaactagtggatacccacaaacaaccagaaaataaatctaaattatttcatatcaataaactaaataagcctttcaagttatccatcaagtttctcacagaatctgaaaggacagaacttaactcacaaatagccaagtttagaaatacctaatagaggattctaaattgcttttgagtacagtactgctattaaaggttagctagcagactgtaaatgacattgtctactcagtatttccacttggaaatcttaactggcaatgttaaattgacgttgccaaaactaaattcttgagttcccccaccctcaagtcaatctctggcctcgttctccagcctcattctcccagttgtttaggcaaaacacctaatagtcatccttagtgtctttccttcctataatatatatctaatccattagcaagtcctgtgagctttactttcaaatatatcttgaacctgcccacttatccctatcaccactatcacactggtccatggcaccagcattccttacttggaccactatttaaaaagtttttcttaagccttttattatagaaaatttcaaacatacacaaaagtagagggaataactatgataagtaagcccccatgttcccatcacatttgagctttaatttgtggcaaattttgtttcttctacatcctcacccattttaccttgcccctaaagtgaaacaaaccccaggtgctgtatcaaaaaaaaacttcttaacaggtctatctgcaaccacttctgccctcgattatctatctactcaccaaatagcaaccagagtgacttaaaaaacatcgattgtacagtgtcacttccctgcttaaaaccctccaaatgcttccttttgtacttgtaaataaaaaaaccagtctttagcttggtcttcaaggacctgtaacatcctacaggactactcctctgatcttgtatcatctccccttttgtttaccatgatctatgattcttctttctgtttcttcgatgtttgagggactttgtgctttctgttccctacttggaatacttttcttgtggcctatcattatgtaagtctcagcttacatatcactgctccttcccccaattccaatcatactctatcctgttgttctgttttgtttccttcagaatatttatcataaactaaaattatatttatttaggtgtatacctgttgtggttaccttcctatagtagaatataagctccaagagggcaaggacttaattttgtgcatcactgtagctgcagcactggaaatagtctaaggcacgtattagctgcttgaacaataggtgatggatgaatgaatttatcccagttttttccacactgtatgtctgtcctgtcactgtagcagaaattgtaatttaggacaagtctcacatgtaaaagtaataaattatataactcaatatatgtggcagattaatggactttaagatgtttgatgatagattagcaaatgaagttaaatcacctctataatgttatcagacattgattcaattttatcctttaataaagtccatgaagctaataaaacctttgaggtaacctgccaaatagactgaaacacaccttctaaaaacaaaagaatccacagatgtcactttaaaaatctgcatgctggctgggggtggtggtgccttgattttattttgttttcatctttaaataaagcattactctcttgtggtctgttgcacaagccttctctcttgttacaaccgtggtgttcacatgccaccctactgtgggtcactctgttccactcacattacgggaacaacctaaaacaaaatgtctgagtgacaggatgagtgggccacaccacagacaggaaatgaaattcacacttttgccaacacagcaactgctgctttactaaatgaaaatattttaaaaataaaggctaaatattctacctattcaccaggcaaagtaacagctttggacactgtgggttccagtaaacaaagcagttcgctacatctacaaaagaagtgtgtatatttgttgaagagtttaaaacaactgaacatacttcagtcactccttttgtgagataggtagtttctctttgacaaacactattttaagaacttcctggccgggcgcagtggctcacgcttgtaatcccagcactttgggaggcctaggcgggcggatcacgaggtcaggagatcgagaccatcctggctaacacggtgaaaccccgtctctactaaaaatacaaaaaaattagccaggcgtggtggcgggcgcttgtagtcccagctactcgggggctgaggcaggagaatggcgtgaacccgggaggcggagcttgcagtgagccgagattgcgccactgcactcccgcctgggcgacagagcgacactccgcctcaaaaaaaaaaaaagaacttcctggtttttggagttcagcaatactgtttttttatagatacatttgttgcttatgctttaaagtatatgtaagtacattcttgctttaaagcatatctaaatgtgttatttaaaatgaatgcagggctttctcaaagtaagggttaaggagctggacaagggctgttggttagttcaaagccacctggactccagaaactcctgattataaaagaaaggccaggagtcaaactcacatatagtataaatatcacaaattcacatataagagaaaagaggctttcctatttgaaacacaaatgtcaataaacttttctgatggaacaaattgtacaaggtaggccaacagactactatttttttttttttttgagatggagtcttgctctcttgcccaggctggagtgcaatggtgagatcttggctcactgcaacctctgcctcctgggctcaaacgattctcgtgcctcagcctcgcgaacagctgggactatgggcatacgtcaccatacctggctaatttttgtatttttagtggagacggggtttcaccatgttgcccaggctggtctggaactcctgatcttaagtgatccgcccgccttggcctcccaaagtgctgggattacaggtgtaagccaccatgcccaacccgagactactattaaatactattataataggcgcgatacaggctcccagagactcgtggcagataatctggatggtacaatcaatcctctttattccatggccccaggttatgacccctcagttatcaaaaaagtgacattctgttggtcacaaggggaccagaaataagcgtgtggctgattacaaaaatctcttatcataacagaaaaaaattcatagcatggaagtgataaaacaaaatttataaccaccaccagagtttaggtagataaaattccacttgaaaattaaatgctttatttgcatatgaagaaaattatatgtaaatttaatcacatatacttttgtgtaagataaaaggttggtatatcttgccagaatagtaaaagatttattatgtaaatatgtcttcctgaaacagctgcttaaaaattcaattgacaaggagttgtcaattgtctaattaaaaagtctgttcttgctaggcgtggtggctcacacctgtaatcccaacactttgggaggccaaggcgggcagatcacctgaggtcaggagttcgagatcagcctggccaacatggcgaaaccccatctcgactaaaaatacaaaaaaattagccaggcgtggtggcgggtgcctgtaatcccagctgctagggaggctgaggcaagagaatcactggaacctgggaggcggaggttgcagtgagccgagattgtgccactgcactccagcctggacgacagaggggaactctgcttcaaaaaaaaaaaaaaaaaacaaacaaaaaaaccggttctttagaaaggcaggtgaaaactttttcatgtttctgaattgactagttctgtagagtctggcacagaaacagaactgcagtaaactctatgaagtcatttgtatgtgattacagatacctaagttaaatataaccccgaaggacttaagaagccccacagtaaggaatgaatgagataaagaaaatactattttcttgatctaaagagaataattagctgcttgatacaaaaatgacagaatcacctttctaatagagcactcctgacagtgaagttctccagagtctttataacttaaaaacatctatgcttctctttgccatagattgcttgctcaataaggggaaagtcatccctagttaagaaatatatatatatatatatatatagagagagagagagagagagagagagagagagagagagctaataatagctaactcaactagatatctactgtatgctaggtgcattttacattactttatttaaccttcctaacaattctatgaagtaggtactatttttacccccaatatacatgtaagagactgagggctcagagatcataagttacttgcctaaaatctatacagctagtaagcctcagagcaaggattcaaaccaagatttgacttgaaagcttatgctccaaatcatgctctaccatgttgttttcgctttatgatatagtttatggcggacgaaatacaatgtcttacctacacaccttttcaacagaatagaatttaaaagtagagtacaggggctgagtgtggtggctcatgcctgtaatcccagcactttgggaggccaaggagggtggatcacttgaggccaggagttcaaaaccagcctggccatcatggcaaaactccgtctctactaaaaatacaaaaattagccaggtgtggtggcacacgcttataatcccagctacttgggaggctgaggcaagagaattgcttgaactctggaggtggagtttgcagtgagctgagatcacgccactgcactccagcctgggaaacagagcgaaactccatttcaaaaaaaaaatgtagagtacaggagtgagagaaaagaactgaaatccattcggattccaactcttctcattttccccaccacttccccaacaaggccataaacagaaagactacactgaggggaataaagaacatgtctgagatgaatccagctgggctggacagtagagcaagttgtaatatctgttgggaatgacagtggcatctcagtctcaaaaaatggaggaaagagcactcggctttaaatatatttgggaaagtgctctgtgacaatcctttctgatcaaaatcacttcctaaagtatgacatttgttaactggtagtttcttcttagacaaagtgtggaggaaaaggtcaactaagggaagaaaatatttaactgttctgaggttgaaataatctttgaggaatgtggccagggtgatcatccatgaccagcaggaaggtcaaggaagcaaaacaaagcaacaacatacctggcctaactgctgaacgtcagttggatagaaattccactgttctacatgcacacatataagaagaaatggctcatttactatgagaaatcaagtggcacaaagtagatgttatactaaaatgaaggaagcagattttcatgtttatgtttgtaatgccaaactctggagttggtttgatatttctgcttgaagccaaaattagcaggcaaattattgtgtaataacgactgcatgcagtattattgcacaaagtgagttggttggtatttatgttaaattcaagtaccacacataatctgaactcatacttttgtcttgaagaatactcatctagcaaaaactttcaaatatattccactctcccaatatttttctcctcctgataagccttctctgcttcgttgtttaattttcagattcaaggtgctaggacagcttctgtcaaccccactaggtggaaaggaattcatgttcccacttggtgtgaccacaccacagacagggaatttcataataaaaagtttcaaatatcagaccagagttcaaggaattacacaactatcaatactaatgcctaatgaaaaaatctggccaaacccctaaaactggaaggaaaaagtaactgttccttgatgtatgcaacctggcttcaaaagtcaaaagtacacctctaggtagtgaagaaaatgtgattctgtaatcctaaaggaatttagaatacaacaggagaaaatccaaactcatatattgtaatgttctctgtaattagacattcccgccctacccctgcagcatgaccaaacattgaatactagaatgcccagccatacctggaaccctctccctgagggcattgacttcccagacacatgcctctgaatgcaagagtcaggattatttatctccttatcaccagaccagcagagactgggccacatgagtaaaccaattaccggccgaagcagagaagagcttaggactctggttcttactcattaacgataaccatcagacttagttccagctcatcttccacttaaactctgttgcacaatgcccagcacaactatactaggatgcagctatctgtttttcccctttcctaaaactgaaggggggaaaaaggatctgtttgttcaagattgagagacaaattccaatctggacgaaacttcctggtcttttcactacagatcatcaatggaaggcaaaaacaaaacaaaaaaccaaaattacttgttctgttcattttgaatgttcacttactgatacgatcttctaattccatttttgctttaaccatgtgcatcttagaaatgtctgacagagacataatttaggatcaataattttaccattggtcatacaattaaccttctagcttttacagatggggcacatctgctttgacatttgttggttttggctgttcagcaatagatttatctttttcaatatcaccctactctccttttggggaatccattcaaatgtggttctagtggcgtccaactctggaactgcaaggggttttgtaggaagctggaatgtggcttacatctggcagttggaaattctccccgtggaatctgaatctcccctggaaactctcccctgggaccataccccattattcgtactgctttagatacatggggagtgtcgaggtatgggacactctgctcctgctccctggtcttccctgaatgactttagctctttcctttgaaccccaaatatctgagacaggtctcggtcaatttaggaagtttattttgccaaagttaagaatgtatgcctgtgacacagcctgaggaggtcctgacgacatgttcccaatgtggtcggggcacagcttggttttatacattttagggagacatgagacatcaatcgatatatgtaaaatgtacactggttccgtcaagaaaggcgagataactcgaagtggggagaggacttccaggtcataggcagatacaagacaaatggttgcattcttttgggtttctgattagcctttccaaagaaggcaatcaggtttgcatttatttcactgggcagaggagggatgactttgagttctgtctgtcctttgtccacaaggaaattccttgtgagggaggtatgtagcttttaaaaaacttagtagctatctttttaggaatagaatggggggcagttttgccctaagcacttcccagcttgacttttccctttggcttggtgatgatttgggtgatgattttgagatttattttcctttcatatgtctgttctctaagtttggtcctctagcctcccattaggatgtctgacaactttctgacaaatattttacttatgatagttaaaattcatttctggctgagcgcggtggctcacgcctgtaatctcagtactttggaaggccaaggtgggtggatcacttgaggtcaggagttcgagacccgcctggccaacatggtgaaaccccatctctactaaaaatacaaaaattagccgggcatggtggcatgtgcctgtaatcccagctactcggaaggctgaggcaggagaattgcttgaatccgggaggtggaatttgcactgagccaagatcacgtcactgtactccagcctgggtgacagagtaagactgtctcaaaaacaaaacaaaacaaaacatttatgagcttgtaacagagaatctaatatatcaactgaagcccagagaatttactgatttaccctaaaatcacatagctagttagcagtagggctgggcttaagcccccatgtcatctgacactctgggcagcactttaaccctttattctgtgttcgatgttattacaacaggacatattgctaaataatagcttaaacaactagcagttaaaaacactgccagttgaggctgggcatggtggctcacgcctgtaattccagcactttgggaggctgaggcgggtggatcacgacatcaggagttcgagactatcctggctaaaacagcgaaatctcatctctactaaaaatataaaaaattagccaggtgtggtggcatgcgcctgtaattccagctactcgggaggctgaggcaggagaattgcttgaacctgggaggcggaggctgcagtgagccgagatcgcgccactgcactccagcctgggcaacagagcgagacagtgtctcaaaacaaacaaacaaacaaaacccccccaaagaaaacgccactggtcagtccatctgaagagaacaaaggcaggatttcactgcaaagcttggtatgatgcttgttctgtttctctttttctttctttttttttagcttttagcttttggtttgagttttaaattactaccaaatcatgaaagatcagagctgcagggcctttagggagtctaaggcagggctctaaatggaagtagttgggcctaattcaccatgtcttgtgagaccaagcacagatctaaaataattttgacttctgaatacctttgaaaagaacacaccctatcccattcctccaggtagccaccattcttggacttataccaagcagccttgctacaaaacacttctgagtttgctaagatccaagagaccagaccttctcatgacaccactgctgtcttcttgtcttcctctctgtgcagccaccttagcaaggctcagtctcagtcttgcctccagtcaccatccaaaaataaccaccacctccctcacccccaaacaaaaacctaggtgctcaggaaaggaactggtctcaagtaacttcccaacacacaactgacccaggtcctcctggtaactgacagtggtggagagttttgtttttgagaaggtcctcctccaaagagaggagaaactgcctcagctcaaaggaacccatttcccttacagactgaatcaacaaagcttcttggtcctgcagccctaaattctagatgtaaatactttttcaaaatggaaaaatttaaaagctgtctggactcaaaagtaaatgacctgaaaagttctttcttagtatttaaaatgctggatgtcttggttactaagagacatgatgatgaccaacatgtctcttagtaaccaagacatggcaccaagtttaaaataggtgggaataaacaaacaaaatgaaaggagattaactcagaaaaactgttcagcatttaaaaaataatttcatttgcatgattcaacaaataccttcccaggtatttaaaaacacacccgcagaagaaatgcaaattaggctttcaagcatttggcctaagtgtcaaaccctgctttcagaccattctctttcacccttggcaatgtgtctttgaggctaaggtcatcttctgttctttgttgctgttaccttctgatatccttgtcactctttttttaaccccttatcttgtccaatcttctttccccaattccccaaatcctactataatcttaagacatttcagtgttcatacagatgaacatccaacaactttgtctcaaaattttctcatcctcttggtcttcaaagacctttactccttttagacttctagttcacagggtccctctggaagtcacgagttcttgatggacttaatttcagaaattaaactcactttctgattacaactccctctccttgtaattcccatgtgctcactccctcttcaagctgagggagactcctagacccctgattcctgaattttttctttctttttttctttttttgttttttgggacagagtcttgccctatcacccaggctgaagtgcaatggtgcaatctcggctcactgcaacctccgcctcctgggctcaagcaattctcctgcctcagcctccagagtagctgggattacaggcacgcaccactgcgcccagctaatttttgtatttttagtagagacggggtttcaccatgttgcccagactggtcttgaactcctgacctcaggtgatccaccagcctcggcctcccaaagtgctgggattacagacgtgagccactgcgcccggtgattcctcggttttttctagctatcaacctccttttggctttttctttcctaaccaacctagtcccatgtcctatttctttctttcttttttttttttgagatggagtctcgctctgttgctcaggctggagtgcagtggcgtgatcttggctcactgcaagctccgccttccaggttcatgccattctcttgcctcagcctcccgaatagttaggactacaggtgcccgccaccacgcccggctaattttttgtatttttagtagagatggggtttcactgtgttagccaggatggtctcgatctcctgacctcgtgatccacctgcctcagcctcccaaagtgctgcgattacaggcgtgagccactgcacctagcctccatgtcctatttcttaactggtttccctacagtctattctctttgctccagatttcccttcataatactacagcttaaaatggtatggttatttgatgtgttatttattattattacatgtctgagcagtaactctctgtttagcacattacctgacactaaataaatgtttagcaattatagtaattatatgtggaataaatgaaagaaaagcagctgaacacttaaggagataagaaaccatgtctctggatgccacagcacattcacggtctcagtgcaaggatatcagagatgacagtaatgacactgacttgactcagcggggcacttaacacctctggacagctccctctcctactcctttccactgttattccaaaccctctctactctcccaaagtcccattgcaacttctgtttccttcaactttccacagttaacttggccttctatactaccaagaaaatggaggctagctagtgtgatttctctcaattactttctctcacctgcagacttatctcctttctccaatctgagagaatgatgtgacctatgtccttggtcccactccctcatctcctagttttctctctccagtgactacttctcctcagcctggaaacatgcttaagtctggtctctcatacccttaaaagaaaacaacctccatgcccccaaaccttaacttgatcctgtgttctaagttcttatttatttatttattacagttgaacccaggtacctttctctttggcttctttttctgatcattttctttcacgtgcttcaggaagctgtcttggctcttagagtgctttatgtgctcaatacacacattaattagagtgcttaatgtgctcaatacacacattaattctcttggcaagaatcttgccctcaacttgtgtacaacaatgccagcagcatgctggttaacattgtagactccttcagttctgccatggtaacacttgtggggcattcctttttgaacagtacccattcccttgatgtctacattatcacctttcttatagattcgcatatgcatggccaaaggaacaactccatcttttctaaaagacctagagaacatatatcgggtgcctctcctctttccctttgtgtttgtttttggtgaattactggaagatggcagttccggctgaaagtctaagttctctttattaagaaggaagtctctacttgctgtccccattttcttcccttgccagtcaatttttctacccactggcatcttgcttctgtctcaccactcctctgaaactcctcccccactctaagtttgccaatgatttccccagtgatagatcctaaagacaaagacccctttagcttagcatcaatttctgttcttcatttaatacctaatgtgtaccggcaaatcactttctcctttttgactaccctgcccctgctcccctcagtttctaagacattaagtccctctggtaactctctgaccattccagttccatatcctttgtcagtaaccctaccctatccaccgcccttaaaacagagagtctgtttgaccttcaaagtgctttgaaacataaatttattgacaatttttttgaagcagggtctcactctgttcacccaggctgtagggcagtggtgtgttcatggctcactgcagcctcaacctcacaggctcaagcaatcctgccacttcagcatcttgaatagctgggactccaggtgtatgctaccatgcatggctaattttttaatattctatagagatgaggtctcactatgttgcccaagctggtctagaacttctggactcaagcaatcctcccactttggcctcccaaggtgaggagattataggtgtgagccactgcgctcagcccattgacaattaattgtacttaaaaatccagcttcttttgaaaaatcataaaatttgaacacacatgtccatctagcaacaactggccagagatgagcagtggctgccattttagacatgagatggtgttaagtgctatggagaaaaatgaagcagagaaagagtaacagggagtgctgctgtgtatacttacttgtgttataagctatggcagggaaaatctcttcactaagctgacatttaaacagagatctgtaggaattaggggaggcagccatgcagctgtttggaaaaagaacattaaaggcagtggggggagctaggcatggtggtgtgcacctgtaatcccagctactctggaggatgaggtggaaggatcacttgagcccaggagtttaaaaccagcctgggcaacatagcttgtgctatctgaaaaaaaggtagtgggagcagcagatataaaaggccctgaggcagaagaataactggctagcttgggaattagcaaggaggtcaggggcactgaaatgtagttagccaacaatgagtggtagaaaatgagaccaaagaggtagagaagggcaagtggtgtagggtttcagtgtttctactttctcatttgtaattcactttccaacacattgtaattgggattttcttttgcctgtaaaatccaatgaacattttctcagtccttatcaaatgcctgaccatttgatatggttaacaaccatccaccttcttgaaactttcttattattccttctatgtttctgactattccttcacattctcatttgtgggctcctattcttttgtcaacttcttaaataggatgtcttccacgatttcgtcaccactcctctccttgttctatatacactcttctgaatgtctttagccacacttatggctatcaccatcctgtatgttgatgactccttattagttatctattgatgcatagcaaattatcctaaaacttaaaagcctaaaaccacaaaaaacatttattatctcacagtttttgagaatcaggaattcaggaacagcttagctggatggttctggcttaggatctcttaagaggctacagtcccgtcctggctaacacggtgaaaccttgtctctactaaaaatacaaaacattagctgggcgtggtggcaggcacctgtagtcccagctactctggaggctgaggcagaagaatggcatgaacccgggaggcggagcttgcagtaagccaagatcgtgccactgcactctagactgggcgacaaagcaagatttcacctcaaaaaaaaaaaaaaaaaaaaaaaaaagaggctgcagtcatctgaagcctagactgggactggaggatctgtttccaagatggctcatttacatggctgctaataggagacctcagttctttgccatgtaaatttctcctctgggctgcctgagtgtccttatgacgtggcagctgactttccccagaatgagtgatcccagggagaacaaggtagcagaacaatgctttgtgacttaattttggagggcacacatcataatttctgcaacattatactggtaatataggtcagccctatttagtgtaggaggggactatacaaggatagcaatactgggcggcaacaaccactatggaccaccctggaggccagctgccacaactctctgactctctaaaagatcagatctaacatcagagccccagacctataaaatcagctgcctactggatagctgttgtttataatggcaagaacttcaccattacttcagaaactttcatttgtagaaactcagaatctgttacaatggcacgtccatcaatgttctctttgggagttgtgtgatggtcatggtagtggttaggtgttggctttgagcactgtgaaataaagttaaagaggagtttgggcccggtgtggtggctcacgcctgtaatcccagctactcgggaggctaaggcaggagaatcacttgaacccgagaggtggaggttgcagtaagccaagatcgtgccactccagcctaacagcctaactgacagagcaagactctgtctcaaaagaaaaaaaaaaaagaaaaaaaaaagaaaaggggactttgtaactatcatttattgagtacccacctgtgttaggcatgatgcctagtactttacaaccactatcttaaaacaacttgatgaacagaagttcttcccatttcacagatgagaaaacaaaggttttgagagtaacttgcttaaacttaccaattacacaactagtaaattacagagcaggagtcaaaatgtaggcttcttttcttttcttcttttttgagacagagttttgctcttgttgcccaggctggagtgcaatggcacagtctcggctcactgcaacctccgcctcctgggttcaagtgattctcctgcctcagcctcccaaatagctgggattacaggcacctgccactgtgcctagttaatttttgtaattttttagtagagatggggtttcaccatgttggccagggtggtctcgaactcctgacctcaggtgattcacctgccttggcctactaaagtgctgggattacaggcatgagccactgtacctggcctacaggcctattttcaagttttgttgtttttgtttaaaacatcactccctggctctctagcattttgaattctttgcctgttctgtacaacaaggacaccacagtcccattgtagtgttatccaccaatgtaccaatagggttctaaaagtgaattctcaaatactagaacaccaaggaatttttttgttatttaaaaaattgagtcagttcagtgctactttatttcaaccttaccagtaactctcaaaattaattggccacaaaaactgaactccatctgcaaaacaacagtttctcaattttccttaccaaaccatctcttctatagttgttttctaccttactaggctgaacataaaaaatatattgccagtaggacctcttaaaagttcctcaaagttactaattcccaaatattaaaccacggggaacagagaaaggcatggtaaagtatgttgaatctcttttaaatctactgcctggttttctctactatcgctggactgcctgactttttaaagtccctggacaaattcttcttttcgtaactgtttaaatgcatattacagatcccttgggccatgcactaatgcacaaatgaaatctaggaggggcactgctgccagtgttaggttctgacacttgcaaaagcagttaacttttgttaaaaaaaaaaaattaacgatgatggaggaggaggaacaggaggaggaagagaaaaaaatagcaaaaggcaaagtccaaatgacaatttaaggacctgtcaaagaaaagggaaaagagaaagcaagtagaagtcactgtccttaattacctcacaatttttcacccatccagtgttctctgtttcctagtcttttccccttacagaatcactacagaattgtaacaccattacagatgaaaaattcactctactggtttcttgcaaatttaatttattaagctttcttgatgtccaatccaatgtttaacagttcaaattcactaaatgcacattttaaagtaaatttatgaagacgcaatgatccacagctcttggggagctggggacaaagagatcacacagtagtattttgcagtactctagagtgggatgtgaaataacaataattccaaacattttagttagggtttagaaaaagaggaaaataacctaatcaaaatgatccaagagtaaatttaactttcatatgtgttttaaatgtatcagagaaaagaagttaagattcattatatatttgctccagcatagaacggacattgcagtataatcctacacttgttccctggattgcttttaggttttggtcgagctaggtcctataatctaccccagtggcaactcaggacccaggaaaacaagggaaaaaggaaaaacttttaaccaccggctttactactaaaggcaaaatttctctgcaatgattggaaggaaagctagaattctgagggtcttttgttttctcacacagtaagacagctagaaaagctgtatgtaaatcctgcagacttcctaagtcatcaggggaccctagacaccacaggtccaacccttcaaatgtctaagtattggggattacggtttctgaaaggaaggtggctgaagatattcaataacaaactttctaccaaaacaaggaaacatggtccattttgttctttttgtcaaacaagaaagggaaaatgatgaggaggcatggatgtgtccttattcaccattaagaagacaaagggtgagacataacagctctgaaaagggagacgaccagttacaagtgaaacactattactaacaagattagtcaggtattagaagaaatgaggcttgcaactcaacaaagggcagaaaagtatagacatgtcttttttctaaatgagactgtccttgggtgggcagggtaatgtttcttgaaagtcaatgtaatttgtaaggccggatgcagtggctcacgcctgtaatcccagcactttgggaggctgaggagggtggatcacgaggtcaggagttcaagaccagcctagtcaagatggtgaaaccccatctctactaaaaatacaaacattagctgggcatggtggccggcacctgtaatcccagctactcgggaggctgaggcagagaactgcttgaacccgggaggtggaggttgtagtgagccgagatcgcgccactgcactccagcctgggcaatagaacgggacattatctcaaaaaaaaaaaaaaaaaagtcagtgtaatttacaacagcagtttctaaatattaaaaaaatccttcacacatgttatatgtcttacttttaaaaagttggatctcagccatactctagagtacttgggtttcaaaagtcagaaaggaaaataaaaataaggactcatcgatggagtactgataagctgcaatgtcctttgagtaactcaagaccaaaaaccaaaagataatgccaggagaaaaacagggaagtggctaaatgacaaagtatctgaacttctgcttaagacaaaggacacaattacgcaaaaagctatgcacgggaagataacatggcaggaatgaaaacagctatcaataaggatagtaatattgtgggtgatttttttctttttgaaaattttcttaaattatgttattatactgtgttttcagtttttaaaaaggaccgaaaagtggggaggggcagtacaggaaaacacaccgtgggaacagagtcaagcacacagatggtttgcgtaagctaaattttcagacatctgcctttgtgcaagactggaaaaagtagagctgctgtcaacaagttctctgcagtgagagaggggtggagcctgagagaaagtgaaccgtgaagaaaccaacaatccgaagccacagggctgaagaacaaataatttcttagattaagttcctcatttatgagctacccctcttcccaaaatgctttgccatcggcaatgtctactactcaaataaggagaccttaagctgcccatatgtctccacttaagtgactgaggttctctgtcagtagcactacttagctctatgcaagatatcccatctctgtgggcaagatatcccatctctgtgggagatgagatatggtacaatatactgtataaaaatctgggtgagatgcaaatggccccaaacctcccttcattttccaattccaaataaaaaaaagcttatcatgtacagaaaactcatgtaaaagcaaagacaatacagttgttcatctgctctactgccttgctttgatatatgtttaactttatttctgtttagttaaatgaatactcctaggcctatattgtttgctcttgcatgtaaggcaatgaagggaaattgccattcacactgctttatatagtgcccagtgtaacgctatatacacagtgcttaatgaatgtgatctgaaaatggcaatagggaagctgaagactcaagaacactttggaagataagaaagtatggaagatattacaaaacctcttctctggtacatgtgaagaacgggaaggtaacatggcaggaatggaaatggccctaagtaaggaacttaacattgtgggtaattttttctctttttgaaaattttctttaatgatattattctgtgttttcaatttttataaaggaccaaagtgattctggggtggggggtagggcagctcttctggcaggtgagaaagcccacatttgtcatacaaaccacaggaaaggccttatttgttcttgtttgcagcctttaatcaggcctcatgctagggggaacttcttccacttgaaaaatttacttgcaaagttctatctggtgttctgtcttgaacttcccttttctgagaagttgggtgtattgtatgggatactcccatacatctaccttctgggcaaactgactacaaaagatgtgggaaatctcttgttcaggcacagtagcctctcttaggtcctatataagctcctcttcctgaattctcagtcagttaattccacatagttcacaggacccacattttcctgttggtgacagcaaaagctacaacagaccaaattataatttaatcaactagatacagattttaactcaaaggtgtaatacatgcaaaacagaggaaggtgcctattctttctgtactcatataatctaactgaggttttaaaatgtggatgtcagaacctattctagccgggcagggtggctcacacctgtaatcccagcacttcgggaggccgaggtgggtggatggcctgaggtcgggagttcaagaccagcctgaccaacatggtgaaaccccatctctactaaaaatacaaaattagccgggcgtggtggcacatgcctgtaatcccagctacctgggaggctgaggcaggggaatcacttgaacccgggaggcggaggttacagtgagccaagattgtgccattgcactccagcctgggcaacaagagcaaaactctgtctcaaaaaaaaaaaaaaaaaacaaaaccctattctaaggacccagattaccaaatctttttttttttttttttttttttcaaagagacagagtctcgctcattgcccaggctggagtgcagtggtgcattctcagctcactgcaacctccacctcacgggttctagcaattctcctgcctctgcctcccgagtagctgggattacaggcgcatgccaccatgcccagctaatttttggtattttagtagagacaaggtttcaccatgttgcccaggctggtctcaaactcttgagttcaggcaatccacccacctcggcctcccaaagtgctaggattacaggtgtgaaccaccgtgcctggccgttaattttttctgaaggtgttctagttgattctgaaactcagtttggtttgaaaacttttcaagaatacatcacagattttcattcaacaggtatttgttgagagcttattatgtagcaggtcccattcaaggcactggaatacagcaatgaacttttataaaagccagggaatcggccaggcacggtggctcacgcctgtaatcccagcactctgggaggccaagacgggcagatcacgaggttaggagatcgagaccattctggctaacatggtgaaaccccgtctctactaaaaatacaaaaaattagccgggcatggtggtgcgtgcctgtagtcccagctactcaggaggctgaggcaggagaattgcttgaacccaggacgccgaggttgcagtgagccaagattgcaccactgcactccagcctgggcgacacagcaagaatcagtctccaaaaaaaaaaaaaaaaaaaaaagccagggaatcccattactgggtatatacccaaaagattctaaatcattctactataaagacacatgccacatgcacatgtatgtttactgcagctacatttacaatagcaaagacttggaaccaacccaaatgcccatcaatgatagactggataaagaaaatgtggcacatatacaccatggaatactatgcagccataaaaaagaatgagtttatgtcctttgcagggacatggatgaagctggaaaacatcattctcaacaaactaacacaggaacagaaaaccaaacactgcatgttctcactcataagtgggagttgaacaatgagaacacatggacacagggaagggaacatcacacactggggcctgtcggagggctgggggcaagaggagggagagcagtaggacaaatatctaatccatgtggggcttaaaacctagatgatgggttgataggtgcagcaaaccaccatggcacatgtatacctatgtaagaaacctgcatgttctgcaaatgtatcccagaacttaaaagaaaatttaaaaaaagccagggaatcaatagatttgtgacagtggaggtagagagagacaaataagtaaaatgtcaggtgataataaatgctgtgaagtaagcagtgggtaagaggctaaaaaatgacaaggtgcactgctgttttaggtaaggaggtggtcaagatgatattcgagcagagacttaaataaaaaataaaacaaacacactaaccgccctctccagaagagaggggaggcagaacgcttcttcctccatggaaggacatctattcaatccattctggagcctgggtaggcattagtcaggtgaaaggaggttaggagggaaaagaaaggatgtttcaggcagggggagcagcatgtgcaaaggcctggtcagagggacagaacaacttcaatcctattgtatggggaaacagtggagagggcttcagtacagatggggagaggtacagatttggaagggttttctatggcttgctaaggaatctagctttattctgaggctaagagagagccagagtttgcatttctagaaagattcctccaactacaatatggagaatggattggaagaggggtgaaacttagaaaaagggagacagatgtcactttggtattccaggcaagtaacaagggtggtctgatctgagctaatgagaataaagagaatatagataccatgggggctatttgtctagtttattttttagtacaatggtaaatttactccatgaagatattcaaattataagaacaatgagaaatgttttgatatgtgaaaatcccttgcattcataaagaatgttttttctttgaagttcttgattcttctgacaggtccttgtctctaaaaaattgcaaggctttgagtcacccagcagggtcaaaaaaggtctatttacatggctattgcctttcataccatctgcctttgcccaaacttttctcaaaataggttttttccaccatctcaattttgtcttaagttacacttgtgaatcctcagatttggatatcaaatctcccttaatctatctaccggctgccagccaatcatcctggacaagccagggaagcttacaggcaattcttccttatgtcattttgttatcacacatgtctatatcatttcctgccaggcatcaaacttacagcattagggaggaacagctgcagagaatgcttttacacaaaggacttccttccttatcccccattcaacggatatgacaatatactaatgggctctagtcaaatgaacaataatgcagataagttctgaaactaccattttaaaccaataatagacaaagaaagttcagtttcctgaacacagtaacaaggaaaagatgaatgggaaatctgaagccagcttcgatcaaaagaagacaagtgaattttacaaattcatctgtattacattacaataggatgttagtgaaaaactggcaagcaggtaatattaaatttctttgactctcagctaaattaagtaatccattattaaaaaatatctatgagaaggcagttttcaggaacttgaatttccctagttctaaaatcagtagttgtgtaaaacatggctgctggagaatgaaaagataatttacgttaaagatgaaccacaggctatccctaggaaataactggtggagtaagtccagagaataagatttgatccaatatatatcttaaccacagaaaagctgtcatattttaataggtgactaactttgcttcttacctctcttctataaatgcaattgtaacacttaaaaagatgttagaacccacagctagtaagtcactgaatggggaaaaacagaaaacccttcctctaagatctggaacatgacaaggatgcccacttttaccactgttattcaaaatagtgctagaagtcctagacagggcaatcagacaagaaaagaaacaaagagcatcccaattggaaaggaagaagtcaaattatccttgtttgcaggccaggcgcgatcgctcacacctgtaatcccagcactttgggaggtcaaggtgggcagatcacaagaggccaggagttcgagacaagcctggccaacatggcgaaaccccttctctactaaaaatacaaaaattagctgggcgtggtctcaaacttctggcctcatgatacacccaccccagcctcccaaagtgctgggattacaggaatgagccactgtgcccatgcagatgatatgatctcacatttgaaaaaaacctaaagactccaccaaaaaactattagaactgataaacaaattcagtaaaattgtgggatacataatcggcatacaaaaatcagtagcatttctatatgccaacagcaaacaatctgaaaacgaaatttaagaagtaataccatttacagtagtcacacataaaattaaatacctcggaattaaccaaagaagtgaacaacctctataataaaaactataacacacaggtgaaagaaattgaagacgacaccaaaaaaggaaaacatattccatgttcatggattgaaagaatattgtgaaaatgtctatactacacaaaacaatctaaagattcaatgcaatccctatcaaaaaaccaatgacattcttcacagaaatagaaaaaataatcctaaaatttacatggaaccacaacatacccagaatagccaaaatcatcctaagcaaaaggaacaaaaccggaggaatcacattgtctgacttcaaattatattaccgagctatagtaaccaaaacagcatggtaatgtcataaaaagagacacatagaccaatgggatataacacagaatccaggaataaatccatacatctacagtgaactcatttttgacaaaagtgtcaagaacatccattggggaaaggagagtctcttcaataaatgatgtcagaaatactgatgtccatatgcagaagagtgaaactagcctccatctctcgccatatacaaagtcaaatcaaaatggattaaatacttaaacctaagacctcaaactatgaaaccactacaagaaaacactggggaaactccaggacattgaactgggcaaatatttcttgagtaataccccacaaacacaggtaacctaagcaaaaatggacaaacaggatcacatcaagttaaaaagcctctgcacagcaaaggaaacaacaaagagaccacccacagaatgggaaaaaatatctataaactacccatctgacaagggattgataaccagattaatataagaagctcaaacaactctataggaaataaaatctaataatctgatttaaaaatgggcaaagggtctgaatagacatttctcaaaagatgacattgaaatggcaaacagttacatgaaaaggtgctcaacatcactgatcatcagagaaatgcaaaccaaaactacaatgagatatcatcttatcccagttaaaacggctttaatccagaagataggaaataataaatgctggtgaggatgtggagaaaagggaaccctcatatgctgttggtaggtgtgtaaactagtacaaccactatggagaacagtttggaagttcctccaaaaactaaatagaactaccatacgatccagcaatctcgttgctgggcatatacccaaagaaaggaaatcagtataaaaagagatatctgtacttccatgttctttgcagctctactcacaatagccaagatttgcaagtaacctgtgtccatcaacaggtgaatggataaagaaaatgtggtacattcatacaatggggtactattcagctataaaaagaatgaggtcctgtcttttgcaacaacatggatggactggaggtcattatgttaagtgaaataagccaggcacagaaagacaaacttcacatattctcacttatttgtgggagctaaaaatgaaaacaattgaacttatggagctagggagtagaatgatggttaccagagactggcaaggctagtagttgtggagaggaagtggggatggctaatgggtacaaaaatatagttagacagaataaataagatatagtatttgatagcacagcagggtgactaaagtcaacaacaataaattactgtaagtttaaaataagtaaaagaggccaggcatggtggctcacacctgtaaacccagcacttcgggagaggctgagatgggcaaatggcttgagctcaggagttcgaaaccaggctgggcaacatggtgaaagcccatctctactaaaaatacaaaaaattagttgagtgtggttgcacgtgcctgtggtccctgctacttgggaggctgaggcgggaggactgcttgaacccaggaggttgaagctgcagtgagctctgctcactccagcctgggtgacaaagtgggactctgtctaaatatatatatatataattttatatacatataattatatatatatataatttgtttgtaacacaaaggaaggaaaaatgctggaggtgacagatactccatttaccctgatgtgatttgactttttcttttttttttttttggagacaaggtcttactctgtcacccaggctggagcagaatggcatgatcaccactcactgtagccttgacctccagggctcaggtaatcatctcacttcagccttccaagtaattgggactacagatgtgtgccaccacactcggctaatttttttggtaatttttgtagagatagtgtttcaccatgttgcccaggctggtctcgaactcctgggctcaagcgatctgcctgcctcggcctcccaaagtgctgggattacaggcatgagccactgcacccagcctaatgtgattattacacattgcatgcctgtatcaaaatatctcttgtaccccataaatatatatacctactatgtacccacacaagttgtttttaaaattttaaaaagatatgaaaataaaatatgatgaaaaatatgataaggtgactgttaccttcagaatacagctatttgagaaggggctcatcactggaagttcaaaatatctctaaatcaaacctttccataaatggacttacagttctcagatcatgttttcattgacttgatagaggcagtacacagtaggtacacatttggctaagactcaactgaccaggattttctaatcacacttcacttatgtctgggtgcctctgagtcagttttagcattttaggcagtttctccattcacatgagataagggtagtatctcaacatttaaaggcagataggaaaaacatggaatagacaggtgacctggagttcttgctctgtcactaatgaattatataatatgtggtgagataatccagatttcatttcctcatattaacattataaattcttaaagttcatgattttaggagattatcactggggaccttaaaagcactctattaaagatgagatcaccatatttctatagtattaaataagcaaaaataccaactaggtttttcatagcagaagtattttttatttatttatttatttatttatttatttatttatttatttatttatttattttgagatggagtctcactctgtcgtccaggctggagtgcagtggcacgatctcggctcactacaacctccgcctcccaggttcaagcgattctcgtgcctcagcctcctgagtagctgggattacaggcatgcgccgctacacccggctaatctgtgcatttttagtagagatggggtttcaccatgttggccaggatggtctcgaattcctggcctcaactgatctgtccacctgggcctcccaaagtgctgagattacagaagaagtaattcttaaagaatgcctctaaaggttatgtcacaatgggctgggcttctctgcaaatgtgactgttcagaccctatagggtactaaaccctatttagtaatgaaatgattaatttgttcattcattggatccttgcttccactggaaattttttctgcagatagaatcctgtccctccaaccccctcaccccacaaccccagtgctggtcaattaaaaaagaaagggatggagggagaatttctcccaccaaaattcttgtaacagagagcctgcttgggtgattttacgctcacaaaagagggtaaaagacagctgcctgagctaaagcgtggtgaagtgatatctcctgcattggttatattactgattcacttagtcccctagaaaagtcattttacctctctgcatctgagtttcttcatttgtaaaactaaattaatgatatctaccttgtctcacatacttggggataaaatattttctttcttcttagtaggcaaaagtttgcagaagcattctaaaaagtagcaagcaccaggagtatataaatgcaaattattattctaaagaacataaggtacatgaaaagcttaggctttacctttcacatttggaataaatgttgaattctggacaatgaaatagaaacagaagccaccctccaggcatgttttcatgtggaattaacttctggcttctttctgaaataatttgctttggcttttaaaacaattttttggtctagtgcaaaaaaattttacctaaggaaactgagcagctggaaagagcatttcagcctataagcagaacaaaaagtgttcctatttcgttaaatataattctaacagtagaaatggagaccagctaaggtcattttactgtctctctctatatcagccaagttcacacctcgctatatttaggcaaggtatgcacacccattaaagatagaaggaggcttcggctcatagcagtgaggtcattacctcagctgaggggaaaagacactaacagaaaaactgtattggtgtgttccttggaaaccaacagaacaaccaatgatcaattttatttcatccggaatagataaatgtataatctcgaatacgcactgagcaatctctaccacacataactctggtacagtcatgcctaaagcaaagcagcaaatatctttcaggtaactcactttccaggactgcctgccatgccttagccagagacaagagctacccaggtcaacagggtaaaatgttcagcagtttagtctcctgggaaatggaaaaaaaacaggttttcaacctgggaatcatcattgtatcaattaacaccagggtctagctgggaagagtcttccagcagtcttttagttgacagcttcctggatccagcatccagcaaaggaagaaccaaatggggacagagctcactcacagatttagcaaaaacaagcaaacaaataaaaaacaaaacaaaagcaaatcttgcggtacacagattttctaataaagattgtgttgaagtgagtcaggcacaataggtgccctcaaaaggaagctaagaaaaccccactaacaaccagatgtttttggaacctcctcaactgtcaggggaaaccaattaaacatattgaaagaatgcagtaaacatacttctgaaacataagtataacaaatagaaatgtttatcttcaaagaaactgcatgttgcaattatgaaatttcttctgcaggaaagttaaacatattcgatgtttccccaaaggttttctaatgtcactaaagaggattatgaaatctgctgtactttttttttcaaatcagcagttagtgctataaaggtaatattttgaatgttttactttcttcttcatatttaaacaatagttaccaaacagaaacttaacatagttcatatgcatttatgtattcattttccaatatttacttctaaaccaaaagttgtataaatagttcatagctcaatactttaaaaagggtcaattttgaaaaatctcatcttgtttcttctgtattaaaaacactatttaatgaaaaatgtctatctaaatattctcatttaacactaaaaagctgaaataatccccttggaggaaaaatttctaagatacataagtttctcctttacagggtgtttaatttctttcttttttttttttttttttgagatggagtctcactctgtcgcccaggctagaatgcagtggtgcgatcttggctcattgcctcactgctacctccacctcctgggttcaagcgattctcctgcctcagcttcccaagcagctgggactacaggcgcccgccaccatgcctggctaatttttgtattagtcggagatggtgatggggtttcaccatattggccaggctggtctcgaactcctgaacttgtgattcacccacctcggcctcccaaagtgctgggattataggcatgagccaccgcatctggcctaatttctaagtgagagaaaatggtctgagttttctgaaggctttcaagacatagaaaggctttctatgccttgagaaagcccagaaattgccagcgcaaataagcaaatggcaagttggcaaaaatggcacataaaatgtggttgctcacacttccaaaaattcataactatgcgtggtaggctgcagaaatcagccttagtagcaaagaatggcttaatgggttgaattcttggccctcagtgcacaaacagttaaacagcacattcacttcactaaatatccaagcctagggcagtggtcttcatccctaaacctcctaacatctctttataattaattcaataggtacccatactaaaagcagttagaaactctcctattgcctctcgaactttttcttgaaagtaacaaccttaaatcatttttgcctccctggaatagttcaagcactagcaatattttaccctaacattgcttcattttattaccacataggttgtgctgagaaacacaaatattcaggctttattgtaatattccaagttttctttaaacaaataccattcttggaatatctactctaagattattaagaaggagagggtattcaaagggctgcataatccttctcaatagagagaaaaacattagctcacattctttcagcttggggaaatcatgagtgattgtttaaaaatggataaataaatctcagtggttaagttcaaagagcttaaaaagagtttacttgggtttctaaatcaaatacctaaagcactctattcaaggttcaaaattgggggtgggggagatgttggggtaaggtcgttagattcctttgagaatcagatgaaagctatggccttttcctccagaaaaaattaatgttctactcatatataggcccacatttgcatattatttcagtgtattcatgaatttcctggtccaaagctctggactaaaggaacctgataaacaccctaaagaaattatgggtaggtaagaattcatagcctccccactactacccctcactttttaatagataacagctcacctttaacaagaggcaaacgctcagtgatttttgcttggctttaattttgaaaccagaggaaacacaatgaatgggagttgcacaggttcttctgttaatactgtggactctcattttaaagcatactacagggccaggtgcagtggctcatgcctgtgatcccagaactttgggaggctgaggcaggcacatcacaggaggtcagaagtttgagaccagcctgcccaacatggtgaaaccccatctctactaaaaatacaaaaattagctgggcatggtggtgcatgccagtaatcccgctacttaggaggcttgagacaggagaatcacttgaacctgggaggtggaggttgcagtgagtcgagatcgcgtcactgcactccagcctggacgacagagcaagattctgtctcaaaaaaaaaaaaaaaaaaagtaagtaaagaaaataaagcacacatcaggtaaatcctattaagaccctctacctgtcccatcatgctgtctccttcactccccatttctgaaaaatacctctacaataaacatttctagcttgtaatcccagcactttgggaggctgaggcgggcagatcacttgagctcagaagttcgagaccagcttggacaacgtggagaaaccccatctctaccaaaaatacaaaaattagctgggtgtggtggtgcgtgcttgtaatcctagctacctgtgaggctgaggcacaagaatcacttgaacccaggaggcggaggttgcagtgagccgagattgcgccactgcagtccagcctggacgacagagtgacactatctaaaacaaaacaaaacaaaaaaattctatattacaaagattcccaagcattaagtgagagttgacttactaaagccctacagtactagacgtaacaggatttcagtataataaaggattttggataagattttgaaattcattaacattaaatctgccagcaaaagaggttttacacttctctaaacctgttggacactctagaaatgtcaacagctacccagagcatgccatttgatgacagtacttattttccagcagtgtgagaaatctaagatcttatgcagaaagtgattcagcatccaaggaaatgattagatttagggctttactgatcttgattttataatccatgctacatgggaaaaaagattaaacataaggtataacagttactataaaggctaatttttcggttgggcgcggtggctcacgcctataatcccaacactttgggaggccaaggcgggtggatcacaaggtcaggagatcgagaccatcctggctaacatggtgaaaccctgtctctactaaaaatatgaaaaattagccaggcacggtggcacgtgcctacagtcccagctactcaggaggctgaggcaggagacttgctttaacccgggaggcggaggttgcagtgagccaagatcgcgccactgtactccagcctgggtgacagagcaagactctgtctcaaaaaaaaaaaaaaaaaaaaaaaaaaaaatgggccgggcatggtggctcacgcctgtaatctcagcactttgggaggtcgaggcaggcagatcacaaggtcaggagatcgagaccatcctggctaacacggtgaaaccctgtctctactaaaaatacaaaaaattagctgggcatgggggtgggcgcctgtagtcccagctactcgggaggctgaggcagaaaaatggcgtgaacccaggaggcggagcttgcagtgagccaagatcgcaccactgcactccagcctgggcgacagagcaagactctgtctcaaaaaaaaaaaaaaaaaaaaaaaaaaaggctaatttttgtaacagttaacaatcctcatctattttcattacatctataaatgcagtggccttatattatttagattatctgttatatatacctaaaaatcaacttacacatttacataaaatgtctacacttccgtttgtggttcaagtaacagcttaacagtcttctgaccattttctctaaaatagtctctccctcccagctttccttctgtcctccattattttttctttagagctatatcagctaattatttatttataataatttatttacagtctggaatgtaagatctagagctgtgacttggtctttttttgtccactaatgcattcctagtgcctagaacacggtaggtgaccaataaataaatgaatatttactaagtagggatatgaaattaactacagacaaataaggcacagtacaaaagcatgggatataaagttagaagacctgaatttcagtcactgccctttcgtcttcaacaagtcatttaatctctttgaacctcaatcttgttcctttaaaatgatgctgaaatacaacaacacagggttattccaagggttactgcaaataacagaagtgaaaatttgtaatattactataacccagcaattattctcagaacactagcaaaaattccataaagtagactgatcttgagaaagcaagatattctgctaacttacctttgatcttacagaacagtaaaggcagaaagaagtagtgagaaaagtcacaggcttgaacttcacttaccagctggctgaccttgagaaagtctcttatttatttatttatttatttatattatactttaagttctagggtacatgcgcacaacgtgcaggttacatatgtatacatgtgccatgttggtgtgctgcacccattaacttgtcatttacattaggtatatctcctaatgctatccctccaccctcccgtgaccccacaaggggcccgggtgtgtgatgttccccaccctgtgtccaagtgttctcattgttcaattctcacctataagggagaacatgcagtgtttggttttctgtccttgtgatagtttgctcagaatgatggtttccagcttcatccatgtccctaaaaaggacatgaactcattcttttttatggctgcatagtattccatggtgtatatgtgccacattttcttaatccagtctatcattgatggacatttgggttggttccaagtctttgctattgtgaatagtgccgcaataaacatacgtgtgcatgtgtctttacagcaacatgatttataatcctttgggtatatacccagtaatgggatggctgggtcaaatggtatttctagttctagatccttgagaccttgagaaagtctcctaacttctctgaggcttaattttctttttttttcttttttattttattttatttttttttttgagacggagtctcgctctgttgcctaggctggagtgcagtgctgcaatcttggctcactgcaagctgcggcttccgggttcacaccattctcctgtctcagcctcccaagtagctgggactacaggtgcccgccaccatgcccggctaatttttttgtatttttagtagagacggggtttcactgtgttagccaggatggtctcaatctactgaccttgtgatccgcccgccccggcctcccaaagtgctgggattacaggcgtgagccaccacgcccggcctctgcggcttaattttcttatctgtaagatgagaggaaaaaatactaactgcctcaaaagcataattgtttgaatcaaatgttatatgaattgtgaaaacacttttaaaactataatgtggtatacatatatttaattaaataatcactttcctaaaaacaaaactctaatcttgattgctgcaccagccaaacagaaggaaacactatcgcagaagttctcacatggactaagaaaataagtatacatactcccaattcttactgcaggttctccaactttggtaagaggatagactacaacaagaaaaattttataggaagataaaaaatagagaaaacaggggttcagaaacgacataaataagtagcagagttcgaaccgaatccactatctatttaacttcacatcctagtcaggggtggacttgtgacctgtgcagggtttggtgcttgaagggtcccagaattggtgtaatgctctgctgtcttgaaattcttgtttctcaacaacagcccctgccttttcactttgcaccaggccctgaaaattacatggctgtcctgctcacaaccttttactagactagaggataaggacaatagcttagcttagtctctcaatgattctatatataaggatcactgctaacttaaaggatattccccaaaaagaaaactttgaatcaggctgaagattacgtatttgtagtatctgaattctgaagttagccaaatacttagtaaaagccaatttaattaaaaagtgttagccctaataataaatgcaaatatgacttgcctttctttcctaatgctccatcagatcctaatagggcaaaaggtgatgttagtatatgaaatacctgaatctaatctaattgacttcccattaaaaaacccaacaaaaggccctagtgattgtagtttacctttggtttttttatttgatatctgcgttctcacagtaagcaaagcaacactcacacagaaatcatttctggagagaaatctccaatacatcacaatttaattaaattgcatcctttaaaaaagttttcttttctgctcctgctgactgcagaaacagctagtgatttttctctgagtggagctgaaaggccaaagctgatgaactgaacatctctctggctgcaattcagtttttgatgcctccatgtcaaaacaactgctttctccttaaagctggattgacctcgcagtatctgttttgacctctgaactccttatcagtcacctttggtctctgacagtaggtggacaggccaaccacagaggtccactctccagtgaacaaaggcttgctatgtaaaacagatgagctgcgggcagagatccgatctgaagagaaggtgctgaactcatcctctgttccagcaccatgtccagaactgctgccactacaaagtgaaacttcacccaaaagcactttccctgtctgtgatttaaacacaccttcattaaggaagcatcgcagtctcaaagagaggcaggcaaccaacactacagaaaccagcagtaatagacaagaaacctccttcctgtctattctttttcttttattttattaccctcttttttttttttcagtaaatttgccataggtgcctatggatactgtttagatctgctggtgacatttaaagaaagagcctttgagaaacatgcatacttttctcttttctcctatattcaatactcatatagcctaaaagatggaaactggttcaagaatttaaatgacttgttccctaaaaagttaatctcctcacctttgtgaaatatatcaagtgctttctataaataagggcaggaaatgctaacttcataagcatagtcctagtcattaaaataatttgatcatcttctaaaatttaagtatgatagtaacacagtaatatggaaaatctcaatatacttaacacttcctaaacagcacaatgaaatgttgttcaaggtctgaattaatttgctacaggacctaagcaagtctgtttgcttatcttttggctttaaaattctttaagtctaaaatggtgataattttagaataaactgacaatgtggggaacaaacttaaattcacaaacactacccatatgctcaaaaactctctgggataattagtttcttcattgtaactattgatgtactattatttcatctttccattagttctactcaaatagctcacaaactagagcatgtttcaccagtacttaggtatgaaacagggtcttgataacaaagacaagtaagaatcaatttttctgggtcttcaagtagctcaggtgaactgaaagaatcatatttttaaaaacttttatttataatttcagaagcattagaaatatgaattactacaactgttgatgggagtgtagactggtccaactggtgagcaaaccagcaatctgtatcaaaagccctagaaatatgtatgtcctttgtcctagcaatcccagaattgacccttaggatatgtcttttagggacatgggcaaagattgaagcataaggatgttcattaggtgaggttttgtttataactgcaaaaaactggacataatcaaaatgttcaacaatcggattgaatatgaatcagtcttatggaaaacaaacaaccagttaaaaggatatgaaagaaatgcatttggggacaatggcaggatgttctcaatatgctgaaatgaaaataatgaggctgcaaagcaatagacacgaaacaatccccctcctttttttttttttttttttttgagacattgttttgttcttcttgcccaggctggagtgcagtggcgcgatctcagctcgttgcaacctccgcctgccagtttcaagctattctcctgcctcagcctgtgagtagcagggttttgcaggcgtctgccaccatgcccagctaatttttctatttttggtagagacggggtttcaccatgttggccaggctggtgttgaattcctgacctcgtgatctgcccgtctaagcttcccaaagtgcttgggattacaggagtgagccaccatacccagccagcaatctcatttttttttcttttttttttttttttttttgatggagtcttgctctgttgaccaggctggagtgcagtggtgcaatcttggctcactgcaacttccgcctcccgggttcaaacaattcttctgcctcaggcttccaaatagctgggattacaagcgtgtgccaccatgtccgattaattttttgtatttttagtagagacagggttttcaccgtgttcaacaagatggtctcgatttcctgaccttgtgatccacctgccttggcctcccaaagtgctgggattacaggtgtgagccactggcccggttgcttcactgataagactagttcggttaaaaacaaacaaaaaaccaaacaaacaaaaaaaaaatcactcacccagggcaagttcttctttttttttttttttttgagacaggttcttgctctgtcactcaggctggagtgcagtggcacaatcacagctcactgaatccttgacctcctgggctcaaacaatcctcctgggtcagcctcctgggtagttaggacgagaggtatgtgccaccacacccagtttttttttttttttttttcttttcaattttttgtggaggtgaggtctcactatgttgcccaggctggtcttgaactcttgggcccaagcagttctcccgccttagtcttccaaagtgctggtattacagacatgagccactgtgcctggttagttcattttttgttttttgagatggagtcccactctgtcacccaggctggagtgcagtgccatgatctcagctcactgcaacctccgcctcccgggttcaagcaattctcctgcctcagcctcccgagaagctaggattacagacctgcccaccatgcccagctaatttttgtattttttagtagagacggggtttcaccatgttggccaggctggtcttgaattccggacctcaagtgatccgccgacctcagcctcccaaagttctgggattacaggcgtgagcccctgtgcccagccttcttttgattttttgagacacagtctcactctgtcgtccaggctggagttcagtagcgtgatatcagctcactgcaacctccacctcccgggttcaagggactctcatgcgtcagcctcttgagtagctgggattacaggcatgtcccaccacgctgaactaatttttgtatttttagtagaggtgaggttttactatgttggccaagatggtcttgaactcctggcctcaagcaatccaaaagtgctgggattacaggcgtgaccaccatgcatagcacagaagttcatttttaagctgagttcattatcaactttactgtatataatggtagagagttctttttttaaatgcctaggggattctccatttggaaatttctcctgaagttatttataagattgccataaagaagagcactgacattcaatatttatttgttgattttgattctaattgaggaagaggctagatttgttttttttttaagcataacgaactttttcattatgacactatcattttctgacaaatggggcatatggccttcctgagaatttctccaagcatctaaagtagcaacaaaacaagaagagaaaattccagtagcatgggcatagtagactacgataactgggactgactatgggagagccacaggggtgaataagccccggcacactaataaccaggattaaagcgtgttcttaacaaatgtactcaagcacttccaaggggaaacaataaaaaaagtatgattaaagcaatagtttttcatctttacattagagataactagctagtctactacattattcacttttaattttgaaaaaaattatactgggtttaaattcatttggttagaatcactaaatgttatgaaatatgcagtttctcttacctagtttcagtatgccatttttcttggcataggcattattagggcataatttcttttttcttttttccttttttttttttttttttttttttacaaaacaaaacgcttttatttggtccattggagcctgagtcggaagccactgtggagaatcctatcataaaggaatggggctgacagttgataaaatagtctctgtgtcacaagagcgggccgtattcacagggttaaaaatattcacagctcagagtacagggacgccaaagggcagtgggaatgtttctctaggtgaaaaggccccagaagcccctgctggggtaggagggggagtggggggcgcagctggcccgctgccgggggtgaggggccaggtgggccgggtggggatgcaggaagctgggctcagacgtccacacactcctgggtttctgtggggaggtgggagcggctgagtcctgccgatgcccaagatgggctggggtccctctctggcagggccaggccgagggacagggttggctgaggagcctgctggtcccggcgtgtattagggcataatttctaactttttagtagctgcagtatctcttttttgactcaatatcattaaattatcatttgggcttaatgtaacatggcatttatatagttcttgatctttactgataatgtataatcacaggcttactatttgtatggaagattctcatatccactagggtgattttcacgtgtatttgacttagaaactaaagagttgtacattgcttatatagaacattaaatacattaagccattaattggcaactaggccattaaactagtaaccaagccaataacaacaaggaaaaatagctatcagcacacccttccccttatagctcactccattgtaaatattataagccctctgtgtcatgggaataaccctgcctacgacgtgatgctgatgtaataataatatctaaagctaagcacctggaggaagaagagaaagaagttttgctttggattacttgagtgtgtgtgtgtgtgtgtgtgtgtgtgtgtgtgtgtgtgtgtttaaataaacaaaccataaagccactagcagatagtttaatgatttctgttcttgtgttgcctgtggggatttcacattgtgctcacagtcactggtactgattcaataacaatggccttgcaaaattggcaaccttcctaaataaactatgtaaaatctgcaaacactggttactgtgctatgtgcctagtagatactccggatgctctgcccatatgatatacccaaagtatgctcaaagtaattttcttttcgtttttctttttttttttttgaaacagagtctttttctgtcacctaggctggagtgcagtggcaggatctcagctcactgcaacctctgcctcctgggttcaagcgattctcatgcttcagcctcccgagtagcggggattacaggcgcccatcaccacacccggctaatttttgtatttttagtagagacggggtttcaccatgttggccaggctggtcttgaactcctgaactcaagtgacccgcctgcctcggcctctgaaagtgctgggattacaggcgtgagccaccgcacccagctacaatgatacccttctgttctctgaatttctaaagcacaaattgtactgttcatctgacacttaccatgcaataaattgtgctcttatttatcccttcattgacgtcttatttcctcaacaaactgagtatcctgtcttcaggaaccatgtcttgtacttcttttttatctcttacttcttacacagaatagatgcaatttaggataatgatggaaatgacagaatgtttaccatcatgctagtgtgccactctaattatttctcctataatttggctcatatcaaaagagcaaaatgagcaaaaatttaagctaccatatcgtatttaatcctcataggtattataagttccattttactgatgaggaaaaaggtttagggtgattatataatatgttcaaagtcacacagataataaatgatgaactctggagctcaggtccatttcatttcaaacactgcactattactgttaggtacaataacaaatggcaagtagttattctgaatatgtgacccaataaatcttttaagagtttttaaagagaatgtttaaggaacgggatactttaagaattaagtgtgagattttattgaggagggaagggcatcacagaggtaggattaacacaatgatagatatcaagtctgttcaaagggacttcaaagaggttcagttttatttgttgtttgaatccatttatttcactcatctcttaggaagagagatttacattgagaattcacatcctgccacagaaaccccaacttttcaaactaaagctccccctaaaaatagatgaggccaggtgcaatgtctcatgcctgtaatcctagcactttgggaggctgaggtaggcagatcacctgaggtcaggagttcaacaccagctttgccaacatagcgaaactccgcctctactaaaaaaaaacaaaaattagccgggtgtggtggtggacgcctgtaatcccagctactagggaggctgaggcaggagaatcccttgaacccgggaggcggaggttgcagtgagccaagatcataccactgcactccagcctgggcgacagagtgagactctgtctcaaaaaaaaaaaaaaaaaaaaaaaaaggaaaaaagagagatgatacaattatgggaaattaaaacttttgatgttcatgagaactgtgtatattaacattaagagaaagagtaacttaaaagggacgtgggtcagaggagagtcctgaagaaatggcatctcccaagagctctgttgtaagtgatatttatttaaaatcagaggaaaaaaactctcattcaatttagccctcatggagactaactggtttttatgacacaaaattcagagaacagcagagacaaaaatgcaccaataagatgccaagctcataaacctgaccagctttttgctggggtgatgaagtatgcttaaagtgttgcttaagttgcaaacagataaagccatatgtagcataaacttttccgcagtcactacagaagacaatcaatataaagtccacaattagaacgctcaggacttgaaatatcctgttatggatcacgaatatccatgtaaattttgatggataaatattaagtacagatgataaaagtaacaaccataactggaatttttattgttatttcttgtgaataattatctcacgtgatatccaaaatgtcctgaaatgaggcaggtaccatcctcaaacaaacatatacaacaatttaaatagtttagttcattaccaaaaaaaatcaaataattctacttcttctaccctggaaacctaaattgttacaacttttaaagaaagcttataattggctaatactgaggcttctctttatttaggagtgattcaaacctctggattttgtagctttaccaagtgtaactaagccaaatccctcgaattactaaaagaggggttatacccctctaaaaatagattaatgcagaaaacacaagttgttaaattcacacaacatgcaaaaagggtgagcccagatttgccctttggtgtgcaacaagaacaatctatttataaattactggctacaccctttccaaattacaggaacacctaaaaaggccttgatgttcttagcatatttctttaaggtaaacttaattatgttagttatacagcaaccatcctgtatcattcaacgatgcaaagctaactctaaccctaactaaaaataggatactgattttttctttccaccttagaaattgtaaagtatgtgaaagattcagaaattgtgtgataacatctacatcactgttctttagccccaaggcagtttaacatatggtagattaagaggactcccatttactggaaggacccaagagcagatgggagcaagatgatctacagcagtttcagcctctctattattgcgagacccaacagctcttggaaacagagactgacaacatctttagttatttggctttgggcagtgtttatcagtgttaagtctagagacactttccaatttcaggagtaaatataggtgagcacaaaggcaaatagtagtagtttagaaaaaaaaagaaatccattctagacttatcaaaaagaaatcttgacttgagcacatcactaccttaccattcctgttcatcttcattgtgcagatttacttctcagttaacttggctaagcatgattccaagaaagccaaagttgagagctctttttttatacccctcagttataggttaattactgctctgctgattttaaacaatcacaagggtggataaagccacagaaagttaccaccaataataaaaacacaaatgcatctttatactttgacaggggatcattaactgttctttcacatttgaaggccataacacccagaagattcactagatgtaaaccaatttgatcactttcttaaaaatactaaattttaaggctatattctctaaggatcaaaaataaccacaaaaagtcagtattaatttaaaatcaaagaggcatctcgtacctctcttaaatattaatattagtctctttatccaccaaaaagagaaaaaaaaagcccttaaaccataaatgaatgcctggtttcaattactcaattatcaattattcagttatgcttgcccatttctgtagaagacaagatctagattttaagagcatcacagatgataattatatttattcaatgcaaacatggaaatttaaaaatgtgagtggtaaaaaaaattcataaaataaaaaatacttggaataaaacttcttggttctaagctttaaaatacagataatcctactacagagctgtttcagagcacagaaaaaaatgaaaaactacccaaatcattctgtaaatcagacataagctggacgaagacagcaaagattcaataaatatttagatccctaaatgcaaaaccttaaatatttgtaaaccaagcctagcaatatgttaaatgaataacgcaaaaagggtgtagttcagttatgtaaggatgattcaacttcaataattcaatgtgtcattacattagcagtaaaggggaaaatattattccgtagatataaaaaagcagtcagtaaaattcaactatacctaactgaaaaatctttgtaaattagcaatagtaagaaatggcctcagcttgataaatgatctgtgccagaacctacaccacacagtatactcatttacaacacataagaagccttcttttcacacaagcccactagtatcgcactacttaacattagaaggcctaaccaaagcaatgagagttataaatacagtcatgcatcacttaatgacaggaatacattctgagaaattcatcattaggcaagtttatcattgcgtgaacatcatagagtatacttacacaaacctagatggtacagcctactacacaccttggctggctatatgggataaccatataggtggaaaacctgtacagcatgttactatactgaatactgtaggccaactgtaacataatgttaagtatttgtatctctaaacatatctacgcatagaaaaggcacagtaaaaatgtggtatagaagataaaaagtggtacacctgtaaggggcacttacaatcaatggagcttgcaggactggaagttgctctgggtgagtcagtgagggagtggcgagtgaatgtgaagacctaggacatgactgtaactactgtggactttataaacaccatacacttaggctacactaaatttattttaaaaacttattttttcttgtttgttttttgagatggagtcttactctgttgccaggctggagtacagtggcatgatctcggctcactgcaatctctgcctcctgggctcaagagattctcctgcctcagtctcctgagtagctgagattacaggtgcccgccaccacgcccgattaatttttgaatttttagtagaggcgaggtttcaccatgttggccaggcttgtctcaaacttgaggctagacctcaagtgatctgctcaccttggcctcccgaagtgctgggattacaggtgttgagccattgcacccagccaaatgttctcttttttcaacaataactttatcttacagtaactttttaactttataaactttataattattttaactttttggctcttttgtaataatacttagcttaaaacacagaaaaactggccgggaggggtggctcatgcctgtaatcccagcactttgggaggccaaggtgggtggatcacttgaggtcaggagttcgagatcagcctggccaacatggcgaaaccccatctctaccacaaaatatacaaattagccaggcgtggtggcacgcacctgtaatcccagctacttggaaggctgaggcaggagaatcacttgaacacaggaggtggaggtggcagcgagccgagatcatgctactgcactccagcatgggcaactgagtgagactctgtctcaaaaaaaaaaaaaaatttttttttaaataaataaaaataaaaaacagaaaaattgtacaaatatacaaaaatattttctttatatgctcctcctccttcttcttctaagagacagcatctcctctgttgcccaggctgcagtggcacaatcatggctcactgcagcctcaaactcctgggttcaagtgatcctcctgcctcagcccccagagtagctgggattacaggcacaagctactgtgcatggctatacctttattccataagcttttctatttttaaaatgtatttttttggccgggtgtggtggctcatgcctgtaatctcagcactttgggaagctgaggcgggcagatcaccaggtcaagagattgagaccatcctggtcaacacggtgaaaccccatctctaccaaaaatacaaaaaaaaaaaaaaaagtatttttttttactcttgaaacttttttgttaaagacacaaacacacacgctagcttaggcctaaagagtcaggatcatcaagatcattgttttccatctccatatcttgccacactggaaggtcttcaagggcaataacatatatggagctgtcatctcctatgataacaatgccttcttttagaatacttcctgaaggacctgcctgaggcagctttacagttaatattttcttcaaagtagagagtacactgtaggccaggcgcagtggctcatgcctgtaatcccagcactctgggaggccgaggcgggtggatcacctgaggtccagagttcgagaccagcctgatcaacatagtgaaaccccatctctactaaaaatacaaaagtagccaggtgtggtggtgcatgcctctaatcccagctacttgggaggctgaggcaagagaatcatttgaacccaggaggtggaggttgcagtgagctgagattgtgcaattgcaatgcagcctgggcaacaagagcgtaactcctgtctcaaaaaaaaagaaaaaaaaacaaagaaagagagtccactctacaatactgataaaatgttcaatacagtaaatacataaaccagcaacgcagtcgcttattatcaagcattatgtactgtacataactgtatgcactatatttttatacaacaatgcaggtttgtttgcaccagcatcaccacaaacacatgagtaatacattatgctacgacattatgacagctatagtcactaggtgatttttcatccccattataatcttatgggaccacttctgtatctgtggtctgttattgaccaaaatgttgttatgtggtgcataactgcactcagagagataaaattcatttacagataatataatcatccatgaagaaaagtcaataaaatcaagtaaaaacatatactagatattagaaccaagtaagagttttagcaaggtggtctgatataaaagcaaatatcaaaagtgatagttttatcacccacctgctgtaactaattagaaaacgtcatgggaaagtggagcttattcacaagagcaacaaaaaccttataaaatgcccatgaatatacctaataagaaatgtgtgattaccatataaggaaaactgtacaatttaaatgaagaatatttaaaaaacagtgaataatagatccatacatcacattcttcattgggcaggctcattttgtaaaactgttaattttctccaaaattaattcagtaaaatttcaatcaaaatcctaatacaatttttaaaagtgaaaattgataagctgattctaagatttatctggaaaataaaataaaaatagttaggacactgaaaaataccaacaaggaggtaaagcactggcatacatttgtctactaaaggtgtaataagtaaaatgagtactggcatatgaacagaaaaacatgaacagaacttaagagtacagaagtgtactccaagcatctgtaagaatttaatatatatgtagcatttcaaattagtgaagtaagaatgtaaataatggtaaatttggtattagaataactatccaattggaaaaaaaaggttaagctagatttttccctcacactataaataaaaataaattccagatgttttaaagagttaaatatttaaaaatgtaaacatgccagaaaaaatataaaataacactttgagaatcctgaggatgaatggcaagaggtttttaaaaagcaacatgcaaaatcttgaaatcataagataaaatacaacagatttgactatataaaaatgtaaaacttttatatgggacgcaaagttaaaagtcaagcaataggctaggagaaagtatttttgccacatactcagaatatatagagaacataaaaaagaaaaaagccaaatatcaatagaaaaatggtcagaagcacactcaaatcacagaaaaaaaaaaaaccaaaaagatcagttacacataaaaagatgctacacctccatagcaataaggggaattgtaaatagagaggtatttaagagcagggactctggagtctgactgcctgtgtatgcatcctggctggataatctcagacaagttaacctctctgtgcctctcttctgtaattgaggataatatctaactcataaagttgttaagaagagagaatgaaataatatatccactgctcaaaacagtgtcccttagatagtaaatgttcagtaaaaaattatctgccttttttaaattttttgagacggagtcttgctcagtcacccgggctggagtgcaacagcatgaacttggctcacggcaacctctgcctcctgggttcaagcgattctccctcctcagcctcccgagtaggtgggattacaggcacccaccatcatgcccagctaatttttgtatttttgtagagatggggtttcaccatgttgtccaggctggtctcgaactcctgacctcaggtgatacccccaacctcagcctcccaaagtgctgggattataggtgtgagccactgcgcccggcttatctgctattaatgttattattggggttggtgaagatatagggaaagatatgcctacacactgctggttaagagcaaattggtggccaggtgcggtgcctcacgtctgtactcccagcactttgggaggccgaggcaggtggatcacgaggtcaggggttcgagaccagcctgaccaaacatggtgaaaccccgtctgtactaaaaatacaaaaattagctgggcgtggtggcgggcacctgtaatcccagctactcaggaggctgaggcagaattgcttgaacctgggaggcagaggttgcagtgagttgagatcgtgccactgtactccagcctgggcgatagagtgagactctgtctgaaaaaaaaaaaaaaaaagaacaaattggtaaagtctttttagaaagcaatttggctatatgtatcaaatttttaacatatatacaacattaggtccagcaattccaccgctagaaatttatctaaagaaatgtttacatatgtatacaaagatgtgtgtatcaggattgtgagtgcagcactacaggagctctggattcagagacaagaaatgcttgttctagtttcagttctaccatcaagccatgtagccttgtgcaaatcacttcagcattttgattctctagtttgttatgctataaaatgtggacgatgacttgcccaatctgcctcagaggaatactttaattaaggtagggtccttaggccatcatcatcagcatcatctaggaacttgttagaaatgcaaattctccagccacatcctagacttacagaatcagaaactctggggactgtgggtagcaatttgtgttttaccaagccctccaggtgattctgatgcaagcttaagtttggagataagttcatgtgaaaccccttgtacaactacaaagtggaactgaaagagcattagtactattactaatacaaaaaataagactttctaccttttgatttcatgaaaaggtacattttggatgaacatccaatatgctcctctactgctgacgctgagccttagaaagcactcatgtgcttctaggaagtcaagttcatatatgaaccaagtaaataaataaaaatattttaggtcaagtatataaaaagcttaagataacctcaacagcaaatcaagcaatgtttcagtgccttagtttcaagacaagacttttttgatcagaggttttcataatgggaatattttattttatttttatttatttatttttgagacagggttttgctctgttgcccaggctgaagtgaagtggcaccatctcggctcactgcaacctctgcctctctggctcacaccatcctcccacctcagcctcccaagtagctggcactacaggcacgcaccaccatgcccagctaattttttgtaaagacagggtctccctgtgttgctcaggctggtcttaaactcctgggctcaagggatccacctgcttcggcctcccaaagaattgagattataggcgtgagccactgcacccagccgggaatattttaaatggtagtctttgccagaattttatctaacaatttttattcttccctgagcttcttaggacacaaaaatggccacttgtttagtatataatgataacactaacaccttggctccttgcttagtgactacttcccagggactggataatagctctctaaaaaataatacaggcttccatatttttcagaagttcagctttttgttttactaaaatgcacgtacagactcttaaagggtatgaactttttatgatcattctcatcagtctaatccaagactcctgaagtttgaccaaatgattctctgagttgctcatatatatttttttctagtagaattaacacttaacagtataatagtaactacagtttatttctggaatgattttgatcatttattaatgttcttcattgacaggtaaaaaataataccatatttggtgagttttatatagcggcaagggtagaccttaatctaataatgataacataattaccaataaaatacagtaataccccagctattccataatttcacctattatatataacacagttgaaagtaataagagcctatgaaattaccaaaatagatgcccaaaacccacactccgaaagtcataaagtttccttcctaggagagtccataggatctcactttggtctattcactttttttaattttcttttctttttcttttttttttttgagatggagtctcgctctttcgcccaggctggagtgcagtggcacgatttcggctaactgcaagctccgcctcctgggttcacgccattctcctgcctcagcctgctgagtggctgggactacaggcacccgccaccgcacccggctaattttttgtgtttttagtagagacggggtttcatcgtgttagccaggacggtctcgatctcctgagcttgtgatccacccgcctcggcctcccaaagtgctgggattacaggggtgagccaccgcgccagctaaattttattttcaaagagatagaggctgggcgcggtggctcatgcctgtaatcccagcactttgggaggccgaggcaggcggatcacctgaggtcaggagttggagaccagcctgaccaacatggggaaaccccgtctctactaaaaaaagaaagaaaaaaaattagccaggcgtggtggtgcatgcctgtaatcccagctactcgggaggctgaggcaaaagaatcgcttgaacccagggggcggaggttgcggtgagcccagatcactccagcctgggcaacaagagcgagactctgtctcaaaaaaaaaaaaaaaaagagagggagatagatagtctccctctattgcccaagctggagtgcaatggcacgatcatagctcactgtaacctcggattcctaggctcaagcaatcctcctgcctcagtctcttgagtagttaggactacaggcatgaaccactacacctgcctgcctgcctgcctgcctatctgtctatctatccatccacccacccacccacccatccatcctctctcttatctatttattagagacagggtcctgctacattgcctgggctggtctcaaactcctgtcctcccaaagtgctgggattacaagtgtgagccactgcccttggctccaatttactctttaacacaattctcacaggatttgttttttggtgttttgttttgtttttttttgagatacagtctcaccctgtcgcccaggctggagtgcagtggtgagatcttcgctcatggcaacctctgcctcccgggttcaagcaattctcctacctcagcctccggagtagctgggactacaggtgcgtgacaccatggctggctactttttttgtatttttagtagagatggggtttcaccatgctggccaggctggtctcgaactcctgacctcgtgatccatctgcctcagcctctcaaagtgctgggattacaggcgtgagccaccctgcctggcttgtttcgtggtttctaaacccacagcaaacctgagggcagcaaatgagaaagggcaaaaagctcttttgagagggttctcagcagtgacgagagaaccactgggctaagtgtactcatgtatcaaggtactccctcccccaaatacaaaatcttttgagtcagtcttcacttaggaccctaaatctgaattgtttagctgctcccactagttattgctatgtaccacagggaaatactcacagcacttgaggtttacagaatcaggtcttagaaataacacttccctttaggaaagagcttcttaatcttttttgagatcacagatcactttgagaatctgattttaaaatatatttatttactcaacattttcatataatctcaaggagtttgactttctgaagccaatccatagacctctaggtgaccatggacctcaaattaagaacttctttattaggtgctaacagtggatatatttaagttcataaagtttagtagtttactcagaatgattcctaataatttttttaatgatgataagctgtgcagcactataaatgctaaataaacatgacctctaaagtaatactaataaatacagtttagaagaagtgaatattatagcaagtctctttaaagaaaaaagaagtggctgggcacggtagcgcactcctgcaatcccagcactttgggaggccaaggcaggaggatcacttgagcctgggagtatgagatcagcctgggcaacaaagtgagatgctgtctctacaaaaaaaaaaaaaaaagagagagagagagaattgcttgaacccagtggcaggggtggggggtggggtggggggccggggttgggggcgccagaggttgcagtgagccgagatcatgccacttcactccagcctgggtgaaagagtgagacttggtctcaaaaaaaaaaaattagccaggtgtggtggcatgtgcctgtggtctcagctacacagaagttgaagcaagaaggctgcttgagcccaggagatcgagactgcaagtgagatgtcttcaagccatttcactccagcctgagtgacagagcaagggcctgtctcaaaacaaaacaaaacaaaacaagaaacaaagaaaaaagaagtgggaaaatagagacaaaaataaaagacaaatattccaaaaattctttaaaagtttgtcttagtaggaaaactcagtatagcaaatatatttttcaggaagttgaagatttcagcagtcaaagataattcctcagactgccaagtctcaaaagtgaccttgcaactactaaggcaaaatatcatttttatagcggttaagggcagtggcctaggaaatagatctggattctaaggacagttttgtcacttactacccatgcggccttgagcaactacttaccttctctaagcctcagtttcattatctgtaaacagaaaaattagttcataaggttgctatgattaaatgagatagatgtacattaaactcagcactgtgaaaatggtcaataaacagcagctattagttattaatttcaattaactttttgtgcagagatttacagttcacaaagtgttatcaaatatatgatttcttaggatcttatggggtaaaaaccactgtatccccatttgacagtggaagaaactgatgtcaaattatttacccaaagacattaattagtaggaaaaaaaatttggacttgattgaccagaaaacatgatttacaactcctttccccccaaaaagcttataatccctgtcttttaaaaattattttattattattatttaaagaggcagggtcttgctctgccacccaggctggcatgcaatggcacactcatggctcactgcagccttgaactcccgggctaaagtaatcctcctacctcagcctcctgagtagctgggactacaggtgtgtaacaccacactctgctaattttaaaaatgtttcatagagacagagtctcagtatgttacccaggatggtcttgaactcctggcctcaagtgatcctcctgtctcccaaagtgctgggattacagatataagccactgtgcctggcctttttaattcttttttatttttttgagacagggtcttgctctgtcacccaggctggagtgtggtggcatgatcacagcttactgtagcctcaagctatctttccacctcagcctccttagtagctgagactataggcatgcgccaccgcacctggctaattttttctatttttcttaagatggagtctcactatgttgcccaggttggtctccaattcctgggctcaagcaatcctcccacctcagcctcccaaagtgctgggactataggtgtgagcaaccacaccaggcccttttaaattctttttattgtgcttattaggttggtgtaaaagtaactgcagtttttgctattacttttactggccatgaatatacatagcataaaatttaccattttaaccattttaagtgtacagttctagggtattaaatattttcacactgttgtgcaactaccaccatccatccccagaattttttcatcttcctcaaatgaaactttgttctcttcaaatacaaatttcctaccccttctccttcaacccctagcaactaccattctactttacttctctctgaatttgacttctatagataggtacctcatataaatgaaatcatatagtatttatacttttgtgactggcttatttcacttagaatagtatcttcaaggtcattcatactgtagcattatgtcagactccttccttaaggctaaataatattctactatatgtacataccacattttgttaatccattcatccatccatggacacttgggttgcttccactgccatttttaaagtactgttaacactattattttcatactggttatcagtgtcagattatttacccattaacttcttcactctatgaccgttcccgtttttagacggaaaatgcaagtcagtttatttaattgtggagcttttacagtacagggcagtaaaacaacttttgtgactttttttctatttttttagaagctccaccatgaatcaacacacgggagaaaaaaagaaactcaaacgagtttaattcgatttggtaggataggagggcaaaccatctctgaaaataataaattagttgtgagattatctagaaatcaccttacatgctattctctagacctttaataagggataatgtaaagtttctgttgttggacattaaaaagttgacctgggagggagacagtagctttgcttaagtgcaaagagtctaggaaaatcccagcaggtgactcctctgaagccacttggaatgagtgtcaacacactaacacagacccaactgctgctatctaagtaaccttaaaccactgcattgatttaaggatggaacctgaataggaaaagttcctctacttgataactgtgaagtgatattaaccacaagcttcagcacacacacttctcagaaacagctaaaccacagtggaatgacaactctctagagacttcaaaaacagcgacgatttaaagatgcatttgcgctttggtgaatgaaggtgtgcgtgcaggcttgggctgtgagcacgtaccagtagtacaggaggagataaaatagaaactaccgaaatctagccttctggaatcactccagactacaaccagcaggagcgaagaatggtccttctttttgtaaatggttagcaatagaaactttaaaaaaaaaaaacccataatcacggaaagctgctcaccagcaggacccacagggactcccgcttccgattctgtcgactacccttcacccaagtcttccaagtgccaaacagctcagctgtcactcggtcaccacaacttctgagggacaacccgcactttcaaagtccctcaaagttaaacggaaattctcccaaaggattcttccgtccacccccaccccgggacactttccgcctccatgaatccccccaccgttctaccccagcatccttccctccagacgcacggagacctccaggcaagcaggatgcgcgctcgccctcgcttgattgtttgctccccaggatgctggggaaagcggctgctgaaagagcaaactttctgagcgttcgcggaggcggagggcgcgcggcggactcacagctggttgatggcgttctgcgagatgaccgcgttggcggagaagtaaggaatcatgtcggggccaccgaggctgcaggtgcaagcgaggggcgccttcctcttgcgggccaacgtgctcagggtcatggggccggctcaaagtgcacaactccgcatcctggcctctgctctgctccggcacgaggcgcaggctgcgcgtgcacccggcggcggaggcgggcccgccgggtcgcgcggaggcagccgccgaagccccagggctcggcggtagagtccggactgacgggcgtcgccagcagttcgcccccacccgcgtccggggcgggacgggcgggtcctgagagcggagagggtaggcccggccggcgccccgccccagatctcgggacgcccgcgcggatcccgcagcgcgcgtcacagcctttagggcatccggcggccccaagacactgctgcctcggtaagggagtgaagctactcaagggtggacgagaaaggcttgcatttctctaaaggaggatgtttcaacagaaaagtcctgcctcttaaagattggctctatacattgtacctcaaacccgtttttgaaagatcttaaaaaatgtaaaggccataaattcacaagtgcaacaaatatttatcagagacttcctatgtgatttggaaattcagagattacactcacatacatatgtgtgtgtgtgtgtgtgtgtgtgtgtgtatatatatatatatatttttttttgagatggagtttctgctattgtcgcccaggctggaatgcaatggtgcgatcttggttcactgcaacctccgcctcccaggttcaagcgattctccagcctcagcctcccgagtagctggcattacaggtttgcgccaccacgcctggctaatttttgtatttttcgtagagatggggtttcaatgtgttggccaggctggtctcaaactcctgacctccggtgatccgcccgtctcggcctcccaaagtgctgggattacaggcgtgagccagggctcccggcaagattttttttttttaaacagttgaagtaatggtcaaacaaacaaaaaacaatttagattgtcgataacatctactaatgtttgtaagtaaatctatagagggctttcttagccatcccccaattcaaagattcacagccttagctgcacataggaattacttgtggtgggtttaaaaatctcaatgcccaggctgcaccttaataaaattggaatctcttgaaggtgggatttagacgtatttttcaaagctccccaggtgattccaaagtgcagccatggttgagacggcagagtagagatcatatcttcactttacagatacagtaacatttaaggtctaagcagatgacctcgtttataaataatgtcattcaggaacccaggttttatgacatttgatctagggcttttaccttcaaattgtattccctgacgcctttacagttttaagcccttaccatgttccttccaattcactgagcagtgcctttcacctgaccagggaccagctctttgtaaaatatgactgcgctctctctctcctgcatgttgtgctcacaaatggggctggcatggtgcaggcattcaatagaagttagcttccttttattttacctttccagtctcattatgctacagcaaatattttcaggtatcagcattttcagcatttttgaatactagactaaaatatatatcactgaagctgccttagaattctggagtcagaaattaataataatttctaaaaacttcactaaccaattagattaaaattaggaagaagtgactttaagactcaacatgctataatcaagaaaataataagcctttgttttatataaatatttatgctcttttcccattggaaagtttggcaattttcaagatactagtaatgaaataatcaatccaaattataaggtctatgcctaaaaccagaattactcgttagttgattcttctataaaacttaagcctgttgccaaagcaccttgagggacttgaaatactgaaaactcatgctgtaaagagttatctaagtttctgagatatctggtaataggaaagcaccaggtggcaagtgaagagttaacggaaggtctggatcttggagttcatcatcttcatccatctctaggaaggaaaatgtttgaaagatttattcaggctgtgtcagcagccacccaaatggtagtgtaaaaaaaaatctgctgatacaccccaaaataaattgcttaaaatatctggcaaacttgccagtttgaaacttcttccagactgtaatttattacagcctcctgctgtgattaaaaaaaaaaaaaaaagcaggcgcgttagaacagcactattaaggtgagtccagttcctttcatgacacagcagagagaggattttattgaagtcaacactaaatgatgccatttaggacagatgatggcatggtaatcatctgtatctgtctgaaaaagcaggaaatgtatattattcaattcatacttaatatctcttgcatttaaaaatgccagagataaagatttcataaatatgtatcttgtcttttataaataggttcctatagcgacgccccagaagtgcatagtcctttcctttctcctcagaagacctctgtcagtgtctgttcagctaaggaggctatgttaacgtccctatccaggctttttcaaaagcttctcaaagttaaattctcactttgaactgtaatataggaaattaagaaagtgctagaacatgtctcctgcttttttttttttttttccctgagacagagtttcactcttgttgcccacgctggagtgcaatggcgcgatctcagctcactgcaacctccacctcgcgggttcaagtgattctcgtgcctcggcttcctgagtagctgggattacaggtgtgtgccaccatgcctggctaattttttgtatttttagtagaaacagggtttcaccatgttggccaggctggtctcgaactcctgacctcaggcaatctgcccgccttggcctcccaaagtgctgagattacaggtgtgagccactgcacccggcctgtctcttgcttttttaagaaaaaaattaaatcatctttgcaaactgggatacctttaagaaaatagttctttgtgctactgtatgtttttaaaagttgagcaaattccttttctttgcacagtgtgcagagtgtcaaaatgccaatcaatttagtttcagctcaatttaattctttactctccactgtcgggaaacaagcctctagggagcaagctctctgtacccatgcatctaggaattcaaaaatgatttcaaattagattgagcagcatgaaataaactaagttagttttctactctacatgaagtcagaaggggctttctgtaaaaaacaaattttgcacaaaggccctgaagaaaaattgctgcctttctttacattcttgcttgagttggaacatttgaaattagctttatcatgtcatttgctgaccatttcaagattcaaaatgtgaatattctaaaatgttggctcttgacaacattagctatgaccaaattaagtttttgtaggatgacacattaatagtattaaaaatgcttaagtagaaaatgcttaagggacttccattactgtgtatccatgtatcccttatggtataatcactgtaaaacagtgaaaactggagacttacatgctgacctaactgtattccaggacagacctgaaggtgtgctgaaatgcgaatgaaggatgtagtaaatatgtttttgctgctgtgacaaaatttcaacatgagtagatcacttgaactgatgccaaaagcaatgtgctataagccaggggacctagtctgtagttctaacatggtcacttaataaactaagactggccaagtcccttcatctataaaatggggtagcaaaaccctaatgaaatgtccctagatctgttcttatgagagttggggaattttgagaaaggaatctcatccttctggagaatcctgagaaaatgtatctaatccagttaagataaacagtcacctagtgcaaagcagtagagcccagtagttaaaaactctggccttggaattaataggccaggtttggatcgtactgcaaccattagctatgaatttcagttacttagtctttggctcagtacttggcacttaatttagaaagttatcgtgaggattaattaatttacataaagtacttaaaagagtacctggcacaaaaatttactctttcactttaatgtctggcaacttgaaggtaagactcaccgtgcaccttagtttattcactgagaaaatgaaaatgtttagattagagattatcctctatgctcttttccacaaatctgaaaaatagctaaagtggacaacattagaaagtggcaatgatgctgatatcagaagttccagattctagctgctttgtctatgggcaaaccttaatctatcctagccctactttctttaatcttaaactgaggtaatgtttacctcacgggctgattaagatacagggacaaaaggctgggcatggtggcttatgcctgtaatgtcagcattttgggaggccgaggccggtggatcacttgaggtcaggagttcaagaccagcctggccaacatggtgaaactccttctctattaaaaatacaaaaattagccaggcgtgctggtgggcgcctgtaatctcagctacttgggagactgaggcaggagaatcgcttgaacctgggaggcggatgttgcagtgagccaagatcgcactgctgcactccagcctggatgacagagtgagactccgtctccaaaaaaaaaaaaaaaaagatacagggacaaaagtactttgtgaacaacaccaaattcaaatttattattattattatcatcatcatcatccataaattggtcagtcagctttcaataatagaaagctaattgtatttgttttctttcattaccctgaagttgacaaatgaatgaatgaacattaaaatacctgtctgggcacagtggctcacacctgtaatcctagcactttgggaggcggaggcaggagaattgcttgaacccaggagtttgagaccagcctgggcaagatagtgagaccctgtctcattaaaaaaataaaaataatgcaggaggctgaggcaggagaatcgcttgaacccgggaggtggaggttgcagtgagctaagatcgcgccactgcactctagtcggggcaacagagtgagacgctgtctcaaaaaaaaaaataataataataaagaaaaaaataaaatatatgcaaatttcccctatgtaccaccatttcatccaagaagtctttactatgattgtttgccaggtagttttacattaactcagtattaccgtctgtagtaatgtgagatgtgcagtgctcaatttttgtatttttaaagctttcatgtaatagctttaacttacataattttagttttaaaatacttactcataagaaaaaatgattataccacaggacctatttgtatttttatgttttctctaagggctcgatgtagaaaaataaacagtaagttaatcccctgagtatcaaaaggaagaaaaccaacacttagaattacagagtaatgcaacattctgtctcctgttaatctgtaaaacactaggacaaaactctcaagataatatctgaattttcaccaagaggtatcttactacacttagtcaatggcattctttatataatacaataaaccaaactttgtaaacaaaggcacttaaaagcaatcatgttttgcaatcaccatgtggctaatttttaaaaaaagaatatctgaccatagttttaaacactggattaagcaatgtcactgaacctttatagtcttttccatggaacttttcctccataagagcaatggaaaacactgaaaagatctgcctatcaactctaggagaggtgatctctaaggcattcatccccccatagtcttaaacaccatatgctcctgtaggaagagatgctgaaatgctgctttcttcaggttacaaaagccccaaactctattgtttagtaaaaataataggtatttacagatcacttttcacatcaaacacactttacaaaacatttaaccatttagtccccactttatctctttaaacgttttcttttttcttttttttttttagacctctcagggatgaaacattttattttttaaactagttttttttttaaataacattaacacatgctgaatgcttaaatctttttagaattcagaaaggtaaaatgaaagtcaccattctcattctcatcatcttactcccagagatgattgttattaatatttccagaaattttgcttgtatatgcaaacagcaatatattgtagctgctctttaagaagcatacatgcacacacacgcacacacacacacacacacacagaattatacatattattctacttgcatttccccctacttatcactataccttagacatttttccatgttattgtaagtctccctcattcttttaaaggagtataaggcattttattgtacaatcatatataatctatttaaatagtcctttacttatgggcatttaagttgtttccagtctttactattatatacaatatcactatgaacatgtgtttgtataatttttgttcatgtcatgacagggatattgaaaaaaatatttgtgcatacatgtgaatatacttgttggatcaacacctagaggtggaattggcagtttgaaatattttaaacatcttaggacctggtagatattatcaaactgcctacctaaagagtttagttttttattttcctgtgcattattagtgtctcctgctactccatgatctattaaattaactcagggcccaagatgctcttctataccctgtcttttacacattacattaaaagctaaaaatatatatattagaaaagtaaaatatgtttatgggaataaagtagaaaatttataaagaaaaatattatgaggaactatattatggattattttttccaaagaactacttagactataacaagataaatgtaaatttttttttttttttttttttgagacagggtctcgctctgtcatccagactggagtgcagtggcacaatcacagctcactgcactcttaaccgcctgggctcaagcagttctcctggctcaacttccaagtagctgggactgcaggcatgtaacaccacacctgtcgagacgaagtcttgccatgttgcccaggctggtttcaaacttctgggctcaagcgatcctcctgccttggcctcccaaagtgtggagactacaggtatgaatcatcatgcctggctggtaaatgtaattattaagctactttgaagataatacaattttaaattcagaaaattttaaaattatttacttctaatttaggaatatattggagcttttctataaattcagaagatattttgagatctgttcaatgataatgctgtagaacttattaacattataggtgaatgaacctaatgtggcctaataccatcagtgtcctagaatgtagtaagacagagatagaaaaatgggaagtgattttgggagtaacaaagaatggaggctaaaagagccaagaaggttttgaaaataaaataactgaaatttttgagctgacattcagtgtgtgtcaggtgctctattaagagtttacatggccaggtgtggtggctcacacctgtaatcctagcactttgggaggcagaggcaggaggatcccttgactccaggaattcgagaccagcctaggcaacatagggagaccctatctctgtaaaaaataaaaaataataaaaaaatagagtttacatgcactatctcaattcttataaacaatcctatgattctattattatctctatgaggctcagagaggttaaataatttgcctaagcttatacagcagtatttcaaatccagccagttattctggctccagaaccttctttcttaaacagtattctatattgtctccatgatgatggaggttcattacaggtttaaactgaaaaggtctattgccaacagggagaaagaactcttggggaccttaaatacctacctgactgcatctggtattttcttctctacttgatcctacttatgcctagcaggttctgacaataatagggacataacctggtactaaatatagcagtaagatgatcttttggctgctgtataccatcctcttgctaccagatcctttggaactctgtatttcaaacttgtattcatcacattttccaaagcacttatatctaaagatatttttgtgtttgtagtttttacacaacatcctacatgaaggaggcatttaatgtatttgtgaatgatgatggcatcaccatcatcttatttgatgtttaaaataagcctactagctgggccagtattatcattccttgttatagttaaagaaaaagatgaatcagactaacattgagttgataagaagcctagattctaggcttatcgaacgtgtccaattcatcctacatattattgacagattaactaaattcagtttgactaatcttgaatacctgtatgccaggcactatgttacatgctgattatcaaaatgaatgagttaaataacttttacactaattccctactcaaactccccaaatacttctctattccctttcagatcaagtctaaactcttccttctagcctacagatccaccataatttaaatcctactataatccagtcattacagcatataatcctcaacttcatcctttctctaacacaatcagtgtatcagtgtaactacctttcaaaacaaatttttgctatatttagtttttttttttttttttttttttttttaacagagtctcactccattacccaggctggagtacagtggtgcgatctctgcttactgcaacctctgcctcctgggttcaaaagatactagtgattctcatgcctcaacctcctgagtagctggaattacaggctcgagccaccacccccggctaatttttgtatttttggtagagacaaggttttgccaccttggccaggctggtcttgaactcctgacctccagtgatctgcctgccttggcctccccaagtgctgggattacaggcgtgggccaccttgcccagcctaattagattatttctatcctgtccttctatattcaagtctcattctctttttttataattaagtcactttttttttttttcaaaatggagtcttgctctgtcacccaggctggggtgcagtggcatgatctttgctcactgcaacctctgcctcccaggttcaagcgattctcatacctcagcctcctgagtagctgggactacaggtgtgcaccaccacgcccaggtaatttttgtatttttagtagagatgaggtttcaccatgttggcctgactggtctcgaactcctgacctcagatgatctgcccacctcggcctcctaaagtgctgggatgacaggtgtgagccaccgtgcccggcccaagtcttattctcctatgtttaaattgttcccattctgagaccacttctattcagcctttcaggtttttcatgtataacatatttttcagacctagtttaattctcagctctttcaataatcagaaactctatagtgttttcatatccatcttcacttaattctaattaaaatcctgtgtaggtaaggagagctagctaggattatcagctttattttacagatgaggaaactaaggctctgaaattaagggacctgcccaaacttacatagtaaatgtcagagctaggatttgaacctacgtcttctgattaagtccagtgatcaattcctggtttatagtacgctgtgacacttttctaagtcctctagaatttataatatgtattacgttattcaaagtcttattttctgtcctctattttgtggcacataatgcatatttatatagacaacaatgagagcatatttatttgttgtcctctaattgctgcctatataacttatctctctactggagcaaatcagacactaactcttttgtggactttatatagcctagcacagtgctatgcaggtcataagcactaaatacatcctggttagatgactgatcctttgcactacatcactttatatctttcttaagatatatcatctttctttcacacacacattatgctctagtaaatatttccttaaagaatcagtacattaatgatggaagttctttctccctgggagcactgcctcactaaataaggagtagcccttaagactccttttcactgcctttcatctctctcttgctgcctcttgttctttggatagatacctccttcacacacagaattcagtagagggcctgaaacacaacctagtaagtaggtaagggttttatttttattttcaagcctgctctagactttcaggagccaaaagttcaaatcacagcaggattgattcagccctttcacaagcaatttagtactatgcagtttgtttaggatggtcaagtttccaggccctggcagagcagcatcattatctctctaagccttcgtgtatcaacttccctggccatatttcactttctatgtctttcttctctgaaatcaggtgaacatgcaaaatcagacacttacacaattatacacttttcaacaaccatgtcaaatatgttcaagaatttaccacaacattggaagttgttttttctctctggattagataaaaccaacaagtatgcaaaaattaactcctcagtccttagtagaaagggggcagtatttatcattcttcagctagtacatcaattaactgagaaaagatgtggtttttttttttccagattctattcagtccacctcacagcaacctaaaaggatagatgggcagatgttatcctcattttacaaaatgaggaaattgagggctaccatagtgtgaggtgagacggaactaaaatcaggtctttttttttttttttttgagacggagtctcgctctgttgcccaggctggagtgcagtggcgtgatctcggctcactgcaagctccacctcccgagttcacgccattcttctgcctcagcttcccaagtagctgggactacaggcgcccaccaccatgcccgaataattttttgtatttttagtagagacggggtttcaccgtgttagccaaaaatcaggtcttcttactcttacttaattgctttctctctgtggtagttaattttaggtatcaatgtaactggattacaaaatacctacagaactggtaaagtattacttctgggtttgtctctgaggctgtttccagagaagattggcatgtgagttggtggactgagtggggaagatccagtctcaatgtaagcaggtaccaaccaatctacctgggctacaggccgagatagaacataaaaggagaaaaaagctttcctctctcctcctggagctaggatactcttctcctcctgcctttggacatcagaactccaggctctctggacttgggactccaggctctctggacttgggactccaggatttactccagtgaacccctccaggtccttaggtctttggcatttgactgagaattactctaaaggcttccctggctctgaggcttttggacttggactgagaaaccctaccagtatcccggtgtctccagcttgcagatggccagtcatgggacttctcggcttccataattgcatgagccaattccccatctgtccatccatccatccatccatccatccatccatccatccatcatccacccatccatccatcatccacccatccatccatcatccacccatccatcctattctgtctctctggaaaactctgactaatatatcctctactactctgctggacgtccagatttccctttgtatataaaaagaaaatcaacactgcacacttggaatcctacctaactaaacaggaagattaaatcagaactgagtttctatccatagaaataatattacaatgtagaaaagaaaagacaaggggtcctattccttgtcattacacagtagaatagaaaatatatatttaaaactcatatacattttttgtttaattacattttttaaaacattttaattttacctgggaaatcttttgtttttcagaaatcttgttttctaagcacctcatgaatagatggcaaacattttgactctcttttctgaagaccaatattctacaaataatactaatcttcaacatcttagttttattaaatgctccttaatttcactttgtaagatttctccatcagatggtttacacatcgccttttgagattattaaatatgaattttgttaaagtgatatgaagatattggcagtttgagagatcatttgggttattttttttatttatttatttttagatggagttttgctcttgttgctcaggctggagtgcaatggcacgatctcggctcaccacaacctccacctcctgggttcaagcaattctcctgtctcagcctcccaagtagctgggattacaggcatgtgccaccacacttggctaatttttagtaggcatggggtttctccatgttggtcaggctggtcttgaactcctgacctcaggtgatccacctgccttggcctcccaaagtgttgggattacaggcgtgagccaccacgcccagccatttgggttataataggaatctttccatagtgtctgtttcctttaaaatatatttaagacataaacatatgcataaggagcatatacatacaggtttcaaggtaagaaaaaccaagtatataaggagttcctaaagtttatactgtttaaactcataaacataagatcagaagagacaaaaaacaaaaacttgaccttatactaaactcagcagttctgaattgtgttcataataaacctttcctaatagccttttactttttcatccaaaacaaataacttgtagtgaacaagaaggaaatttttttttttgagatggagttttgctcttattgcccaggctggagtgcaatggcgggatcttggctcactgcaacctcctcctcctgggttcaagcaattctcctgcctcagcctcccaagtagctgggattacaggtatacaccaccatgcctggctaattttgtattttttagtagagatggggtttcaccatgctggtcaggctggtcttgaactcttgacctcaggtgatccacccgccttggcctcccaaagtgttgggattacaggcataagccactgcacccagcttattaattttttaaagtttcctgcatacttcgtggaggaaagtgagattctaattttgggggttgggattggagagtagagaagtggataagcatgatgggcaaaactttggttcttatatatatgctgctgcttttttaaaaatgaagtttttattcaattgggaaaatcatactgggagagggtaatagtactataaaaagttaatcatccggtcatgaattacatttaaaactgtaaggtgcaggatggcaagagcagcaagaagatcaacattgccaactgtggacaactcgaataagtttgacttgtgtttcaccttaaccaccagaccattccttctgtagctcaggagagcagccctccaccccatttgctcgcagtatcctatactcgttgtgctctcactgcagttccctttgagttctgtgttttccttgttcccttccatgcctagctggattgcagagttaagtttatgattatgaaataaaaaccaaataacaaaacaaaactgtaaggtgcctattgctatacaaacttccctagtttcaatttatacatttatcactcatttactcagtaatttaacaattaggtaattcatgcctattaattgccagggcttggattggaccttgaggatgaaaaatgaagaatgcatgagatctggcagcctagaagggagacaaactggagtgtgaaaaatgaagtccttctttccttttttttttttttttttgagacagggtctggctctagcgcccatgctgaagtgcactggcgcaatcttggctctcctcaacctctgcctcccaggctcaagtgatcctcttgccttagcctcccatattatgaacttttcattactagatttattcaccaaattaatatacaacagaactgcaaataatacagttctagaacagaattagcatcaaattcactaaaacatttttcttttaatcagtgaggaaaccatcctgggaatgtcattttttgaggatatatagctgtcttttatttgtaggttctggttttctttattcatagaaaagaaagtcctctcctgatctgaatttatgcattcaaacttgttccttagatttaaccttggctgtttcattttgtagggtagggacttatcctgagacaatggtcttgttaagttggtaaagccattccattacaagtcatcagtactctatccgtgcccttgagtttttcacaacatgagttggttttaattttaaacataacctgaaaaaaattcttcaaatgcttcaaatactctgtgttccaggggagatatcaggcctagcaggaatttggatcatgagcagcttctagaatcaggctctggctaatagaatccacatatctgcctgtgtagactccttcagtagcagcttggcatggttcttgccaaggtcctctggagcactgctgctctgttgccctaaaggttgaaggccagttcagtactgaagaaggttctattggtggtctcagcaaaaagtgatagcccaaagcccagcgactcctcagggttggctcctttcatgtgatccaagtaaataaagtaagaacttgttgagcatgctcctcaagcatgccgtgatttagtcagccatctgaggtgatacacctacggagtatgctattcctctaacactttggatttatctaggatctttgagctgaataggtctcaagatcttccttcaggacgtgagaaaaatattttaccacctctatgaggcatgcccaacacaccgtctttagctcaaataacttaccaacaatcccaaactatttcagcagaaggttgtggtcataaagagccaagcaaagaaggtttccaagtaaagccaccactgtgatggacattacagttgtgttccacagacccaccatacaaaggcctacttaataataaagggttgttcttgtttggtttattttcattcaagaatcattagtttttctgtccaccagctttgtaaagttgacttcagaatctctgaggcctgcattgtggtctttgcatggatcttttggaatttgatggggcgaacaggcactgacacaagaagttgcagcctacagagctgaaaaagtggatctggattgtcacgtgggtgccatggaattatagggggctatcagtgaagcttggaggtgatgccacagcatggagctgtggcttcagctccctcttgcagtcctcctgactatgccttttaaaatggattaacttttaaaaggatatttgtatagcattttgcaattgctgaaagcagccttttaattcaaaaaagtacagaaaccacattttagattgtggctaaaattttaaattcatggctgggcatggtggctcatgcctgtaatcccaacactgtgggaggctgaggcgggcagatcacctgaagtcaggagttcaagaccagcctggccaacatggtgaaaccttgtctctactaaaaatacaaaaatcagctgggcatggtggcgcacatgtgtaatcccagctacttgggaggctgaggcaggagaattgcttgaatctggaagatggaggttgcagtgagccaagatctcgccactgcactccagcctgggtgacagagtaaaagagccagactccatctcaaaaaaaaaaaaaaaattttaaattcattatgattatcagctatttaatcattaaatcttataccttacagcatctatctagttcttattggaaaggcctccttggctttagtagttaacacatacatacttatggattattgagaattatttattttgctggaggcaaactcatatacttttaattactagcccatcctgtttaaggactcatgctttacttataaagtgttattcaggaacaacctaatacgaaaatgtatggtgcactgaaataatgaaaatgcacaattccatggtacctacattcattatacaaagaataaggatggaaagagaatcttccaaacaccaatccttgtctttagaaaattgaaatgtcattacaaacaattctttctacaaccagctactggttgatcttacatttgatctggtgtgcaatggctgcaaacagcagcctccttggtggtgtttgcagcctgttgcttgtatgagttgccctaatggaccttggagacagccctttccaatgtatattcatgcctctgaccctgcactatccccaaactagaaaaaaaaaaaaaaaaaaaaaacctgatctggacggtctttgagatagaggtcactgttgccacatcccatcctgccttgcagcctgccatgagtaaggggccagcagatgggaacagtatcctctcaactgttcctcaagagttcttgactgtcagctctttcccctcccatgaaaggaattcttctcttctgatatgattatactgttgcttttccccattcctctttcccctactagaaaaaaaaaaaataagtactgcaatgaatgtgagaatatttgttctaacattttacagtttttcaatgagaactgaattatgggatacataaatgttttgcatggtggaaaaagggtagaggccacaatttcacagctacccaaatcacatttctcttctagtaaaggatttctgccttagaccttttccctctggaatacagaatttctgctaaacattgaccctggtaatgagagagaaagtccagctgaaaggaaagtatcatgctctcttttctccaagatgcaatctgtaagaatctatagtcataagtcatgtagcctggatgggcgtggtagctcacgcctgtaatcccatcactttgggaggctgaggcgggaggatcacctgaggtcaggagatcgagaccagcctggccaacatggtaaaaccccatctctactaaaaatacaaaaatcagccgggcatggtgatgtgcatctgtaatcccagctactcaggaggctgaggccggagaattgctggaatccaggaggcggaggttgcagtgagccgagatcacgccactgcactccagcctgggcgacaagagtgagattctgtctaaaaaaataaataaataaataaaaataaataaataaataaataaagtagccaggtgtggtggcaggcacctgtaatcccagctactcgtgaagctgaggcaggagaattgcttgaatgttggagatggaggttgcagtgagctgagatcatgccactgcactctagcctgggtgacagagtgagcctccgtctcccaaaaaaaaaaaaaaaaaaaaaaaaaaaaaagtaagtcatgtagccaagaggattttgttactactaaataatcatttgagtttttattagtctgggttttcataatatccaggaaaacaactcttccaaaagtcaatttggcaaaattaagaatcaaagggacatttactttacttttgtttttcttatatcatgaataacatctaggggggaaaagtaaaattatttacctagattggaaagatatacctaattttttttctaacggaaggaaggaaggaagtgaaggagggagggaggaaggaaggctggccaaatttaattatggctgtgataatcagatttgcttttcaaatcagatttaagaagtatggctttcacatccaccagacacagtacacatcagataaatataaaatagtgtctgtgaatacattcttcagaaacaaagaatacttcagtgaaatgaaaattcttactgctgttaagtagctaggaaaagaggctttaaaggtgtacacttaaccatcccagcgaggctactctgtatgatagcagaaatttaagaaaatgagaagacagctcaccacaccccctggtggccaccccccaaacatttataaacggcagatagttctctattctgtacaggaaagtgtaacccacatggtgggaggtgcacagtcagggtgcagaaaggcccacagcaaaagatgaacagtggctgggcatggtagtttacgcctgtaatcccagcactttggggtcaggattcgagaccagcctggccaatcctgacagatgaaaccctgactctactaaaagtacaaaaaattagctgggcgtggtggtgggccctgtaatcccagctacttggggggctgaggcaggagaattgcttgaactcagaaagtggagtgtgctgagatcgccccattgcattccagcctgggcgacagagtgagactctgtctcaaaaaaaaaaaaaaaaaaaaaaaaaaaaaagatgaacagcttcaatgtgatcagttacagccactttctaataaatggaaagctctacttttgtttaaaaacaacaacaacaaaacaaaaaaacaactctggccgggcacagtagctcacgcctgtaatcccagcactttgggaggccgccggatcacctgaggtcagttgttcgagaccagtctggccaaagtggtgaaatctcatctctactaaaaatacaaaaattagccgggcatgatggcacgtgtctgtaatcccagctatttgggaggctgaggcaggagaattgcctgaacctgggaggcggaggttgcagtgagcctagattgtgccattgcattccagcctgggtgacagagcgagactccatctcaaacagcaacaacaacaaaaaaaccctctgtttctctttctaatgtatatttcctgtcataagtgcaatcaatattcagtttctccatgaaatgttaacatcatcactctatttcttaaagaagagtgaggtgatagagcattttattgccaaatggctcagaaaaaaagttccttgtattgtatttgtaatttctctgtaagtatgagattgtttcaattttttttttttttttttgagatagggtcttgctgtctccaggttggagtgcgatcttggctcactgcaacttccgcctcccgggttcaagcgattctcctgcctcagcttcccaagtagcagggattacaagcgcgcgcctccaggcccaggtaatttttgtatttttagtagagacggggtttcaccatgttggccaggcaggtctcgagctcctgacctcgtgatccacctgcgtcagcctcccaaagtgctgggattacaggtgtgagccactgcgcccggtctaaacatttttttaaagataaaaaagatgaggattaaattatcagctcatatttacaatggacctacttttttccccacttttcctccctttttttattttttatttttgagaggagtctcgctctgtcgcccaggctggagtgcagtggcacgatctcggctcactgcaaactccgcctcccggttcacgccattctcctgcctcagcctcccgagtagctaggactacaggcgcccaccaccatgcccggctaattttttgtatttttagtagagacggggtttcaccgtgttagccaggatggtcttgatctcctgacctggtgatccacctgcctcagcctcccaaagtgctgggattacaggcgtgagccacggcgcccggcctttttctccctttttaaaatttaagtacaatgctcatattctcaaagttaatatagtctttaactagaacatatactgaggcagaaataaatttgtcctcttttcactgctgaaagatgggcaaaatagtatatatattgtcatgatatttaaatccatagaaaaattatttcaccaaataggtttgaataaagatgaagtcctatctcaaagataaaaaataaacagagcaaatacacaataaagaaaacttgacaaggtaccaaagacagaaatctggaagaaaaatttagctgcaaattagtaacagtgccactgagaaaccatctcttatataaggacatgccctaatcctgtgttttcttttttttttttttttttttttttgagatggagtctcactccattgcccgggctagagtgcaatggcgcagtctcagctcactgcaacctccacctcctaggttcaagcgattctcctgccttagcctatcgagtaactgggactacaggtgcgtgccaccacgcctggccaatttttgtatttttaatagagacagggtttcactatgttggccaggctgatctcgaactcttgacctcgtgatccgcctgcctcagcttcccaaagtgctgggattacaggtataagccacggtgcccagcccaataactttttttcttttctcttttcttctcctctcctctcctctttttctctctctcctctctctctctctttctttcttaacagagcctcgctttgtcgcccaggctggagtacagtggcaaaatctcaatctcggctcactgcaacctctccctcccaggttcaagcaattctcctgcctcagcctccagaatagctaggattacaggtgtgcgccaccatgcctggctaatttttgtatttttagtagagatggggtttcaccatgttggccaggcttgtcttgaactcctgacctcagatgatctgcccacctcagcctcccaaagtgctgggattataggcacgagccaccatgccggccctatgttttcttttaactgccttcaaactgtttctacttgaataatgccccgttgtttcatatatccaaagtcaaactcttcatatggtttctgacagagttccctttcttaactagtattatttctagtacagtaatcaatattcttctattcctgttcattcactaagcatttactgagtgccaactacatgctaattggataccaaagtaaaatacataatccctgtcctcatgctgctctcgtacaggaactagccatttgcctgaattactgcaacagctttcttgatagttttcttgcctcccctcccctcatgctgtataatactgccagactccttctggaagtcatgttatacattttttctttttttgtgcgagaccagagttttattactactcaaatcagtcttcctgaaaacttgaggatcagagttgttttttgtttttttttctgagacggagtctcattctgtcgcccaggctggagtgcagtggtgcgatctccgctcactgcaacctctgcttcctgggttcaagcgattctcctgcctcagcctcccaagtagctgggattacaggcatgcgccaccacgcctggctaatttttgtatttttagttgagacggggtttcgccatgttggccaggctggtctcgaactcctgacctcaggtgatctgcccgccttggcctcccaaagtgctgtgattacaggcatgcgccactacacctggctaatttttgtatttttagtagagacagggtttcaccatgttggccaggctggtctggaacccctgacctcagttgatcttcccgtcttgggcttccaaagcgctgtgattacaggcatgagccaccgcgcctggcctggatcagagttttggtataaaggataatttgttgggtagggggccattgaattgggagtgctgattggttggctcagagataaaatcacagggagttgaagctgttcttttatgctgagtcagttcctgagtgggggccacagaactagttggcaggtccaggtggggtcattcggttgttagaaatggaaaaaccttatttattagggttctctatagggacagaactttatataaatataatatttatatttatatattatatatataatatttatatagttatataacatatattatatatatatatatatatgtaaaggagaattttttaagtattaacttacatgatcacaaggtcccacaataggctatctgcaagctgaggagcaagaagagccagtccgagtcccaaaagtgaagaagtgaagaacttgcagtccaatgtttgagggcaggacgcatccagcatgggagaaagatgtaggctgggagctaggccagtctgtcctttttatgtttttctgcctgctttatattcgctggtatctgattagattgtgcccaccagattaactgtgcatctgccttccccaggtaatctcttttgcaacaccctcacagacacacccaggatcaatactttgtagccttcaatccaatcaagctgacactcagtattaaccattacacctgaaaaggcatctcaaaaagctgatcttaggttcacaatagtgatgttacctttaagagtaattgggggggccgggcgcggtggctcacgcctgtaatcccagcactttgggaggccgaggcgggcggatcacgaggtcaggagatcgagaccatcccggctaaaacggtgaaaccccgtctctactaaaaatacaaaaaattagccgggcgtagtggcgggcgcctgtagtcccagctacttgggaggctgaggcaggagaatggcgtgaacccgggaggcggagcttgcagtgagccgagatcccgccactgcactccagcctgggtgacagagcgagactccgtctcaaaaaaaaaaaaaaaaaaaaaaaaaaaagagtaattgggggctggacgcggtggctcatgcctgcaatcctggcactttgggaggccaaggtgggtggatcacctgagatcaggagttagagaccagcctggccaacatggttaaaccccatctctactaaaaataaaaataggctgggcgtggtggcacgcacctgtaatcccagctactcaggaggctgaggcaggagaatcacgtgaacctgggagatggaggttgcaatgagccaagattgtgccattgcattccaccctgggcgacagaccaagattccatctcaaaaaaaaaaaagagtaattgggggccgaggcaggtgaatcgcttgaggtcaggttacaaaaattagctgggtgtggtgacgggtgcctgtaatcccagcttcttgggaggctgagacaggagaatcacttgaatccaggaggcggaggttgcagtgagccgagattgcaccccactgcactccagcctgggtgacagagctagactccttctcaaaaaaaaaaaaaagaataattagggaagttgtgaatcctatgacctcctgaataatggttggtgatatttagaattagtcatgtcattcttctacacatagatctatcaaattgaaactcctctgcttttaaggtatagacagttaccttcttactttcctaaaacacattagctcctattttcagacttttgatgatatccttccattctccccactctcctatgtttggaatgctacccttttcttctgttctcctatctaaatcccattcattcatcatgactcagctctggcccacattgcttttttcctctcctctgctgcaaattttattttcattgctatctttgaaacaactgaggaaaagaccaaattttctttttgttttgtttttattttgcttcatttttcccttataaagaccaaattttcaaaggtgaagaattttttcagcagatggtgagtaattttttatgtccatgaaagactaaagaggaagaaaccaggcttaaaaataggggagggtttcagctgaacatgaaaaataatttcttcattttcaaagtaatcaaaaaaagtataatatattatatgtattgctggaattgagagaagaaatgtaaaactccttactttatacagttcttatcttggggttggcacacacaagaatgaaagaattctactataattaaaattaaattaagatctcaaagtactttgtttcctatcataactattcactattcaccttaaaaaaggtgtcctgagattgcaagatatatttcagtgcaatcttgttcatttttatttatcatcttataattgtattaggttgacccatatgagacagctgtttacagttaatatgtttgaatattggcgtttcattttttttttttttttttttttttgagacagagtcttactctgttgcccaggctctggagtgcagtggtaccatctctgctcactgcaacctctgcttcccgggttcaagcgattctcctgcctcagcctcctgagtagctgggattacaggagcgtgccatcacgctcaactaatttttgtatttttagtagggatgggggttttgccatgttgaccaggctggtctcgaactcgtgacctcgagatccacccacctcggcttctcaaagtgctgggattgcaggcgcgagtcaccgcgcccagtccgtttacttttttttttttttttttagacggagtctgcctgtgtagcccaggctggagtgcagtggcgcgatctcggctcactgcaagctctgcctcctgggttcacaccattctcctgcctcagcctccccagtagctgggattacaggcgcccgccatcacgcccggctagttttttgtatttttagtagagaccgggtttcaccgtgtcagccaggatggtcttgatctcctgacctggtgatccacccgcctcggcctcccaaagtgctgggattacaggcgtgagccgccgcgcccggccctgtttacttctatagttattttcctggctattccccggtcagcaaagtgggtcatcacacaagaaaaagttgagttcataaatatgcaaaggaaatactggcatcaaatttcatccatttatcttttgaccaaatagtgagacaaacaggttggaaaggttccctggcaaaactccagccagcctgcatactgaggtggagcttcgggaagttcgcacaatttgcatggggaggagcctggcccctcctcttcctttgtgaaacctgggattcaaactgcaaggcaggaaggaaccagcaggaattctagccttgcagaaagtccctgttccccctttgttttcctttttgccccataaatcccattattctcacccttcaatcatctgtgagcctaaatttttgttgccatgggacaataactctgtctttagctgaactaaggaaaagtactgcaacaatagtcaatgatataaaacctgattttctgtaattatgttatctttttatgcctgtcttctgagaaaaaaaaaatattgctggagttcaaatatcacaaaaaggtggccagccatggtggctcacacttgtaatcccagcactttgggaggctgaggcaggaggatcacttgagcccagcagtttgagaccagcctaggcaacatagggagaccctgtctctacaaaaataacagaaaatattagctgggcatagtggtgcatgccggtggtctcagctacttgggaggctcaagtgggactgagcccattactgtatcgctgcactcccgcctgtgtggcagagcaagaccctgtctcaatcaatcaatcacaaaaaggggctagtatggcataaatacattgtttcttaattgtggtaaaataaacataaaaatttccatcttaactacttttaagtgtacagttcactggcattaagtacgttcacaatgttgtgcaaccaccaccactatccatttctagaacttttttcatcttccaaaactgaagctccgtacccactaggcaataacttcccactccatccatcccccagtcaccattattctgtccgcatgaatttgattattctaggtatctcatgtaagtggaatcatacagtatttgactttttgtgattggcttatttcacttagcttaatgtcctcatttttacccacgttgtggcatgtcagaacttatttcctttttaaaggctgaacaatattccactgtacatataatacctcattttgtttatccattcatcgttgatgaacacttgggttgcttccatctcttggctattgtgaataatgttgctatgaacacgggtgtatgaatctcttaagaccctgctttcaattcttttaggtatctacccaggagtccagaagtggaattgctggatcatatgatcatattctatttttaattttttgaagaatcaccatactattttccattgcagctatgccattttacattcccaccaatagtgcacaaggcttccaatttctccatatcctcaccaacgctttatgttgatagtggccatcctaatgggtatgaggtagtatctcaccgtggtttcaatttgcatttccttaatgattagtgattttgattttttttttttttttaagagacagggtcttgtactgttacccaggctggagtgcagtggaaccttcttagctcaccacagcctttaattcctggactcaagcagtcttcccacctcaacattctgagtagctgggacaggtgtgtgacaccacacctggctaaatttttttatcttttgtagagatggggtcttgccatgtttcccaggctggtctcaaactcctgggctcaagcaatccttccttctcagcctcccaagtgctggaattacaggcatgagtcactgcattcggccttgagcatcttttcatatgcttattgcttatttgtttatcttctttggagaaatgtctattcaagttctttgcttattttttaattgggttgtatgatggttaattttatgtgtcaaccatcaacctgactgggtcacaggatgtccagtatttggttaaatattattctcggcttatctgtgagggtgtttctggataatattaacctttgaatcagtagactgggtaaagcagactgtcctctccagtgtgggtagtcctcactcaatctattgaaggcctgaatagaacaaaaggctgaataagggagaagttcctccttctgcctttgagcaaggacattggtcttctattttcggactcagacttggactcagcaaatggtggactgagccaccattggctctcctagttctttaagcctttggacttggactggaactataccattagttctcctgggtttccagcctacagatcttgggacttctcagcctcaataatgtaaaccatttacttagaatcaatttctttcttttctttctttctttctctctcttttttctttctttccctcactctctccctcccttcctcccttcctcccttcctccctccctctctccctctctctatatatatctatctatctctatgagataccctttttggttctatttctctaaagaaccctgactaatacagatattggtcctgagaaatggggtgctgaggctttgaaaccaggtaatgggtagaagagttttgaagtgcatgctagaaaaagccaagattgccatgaagggattgctaaaggcaattctggtgagtgctcagaaaggatagaggagatctggagaaaatgcttccatcttcttagagaatacataaagaaccacgaacagaatatttgtagaaatatggatggaaaagccctttctgacgaaggctcagatggaaacaagaaacatgttagtggacaatggagaaaaggcaatccttgttataaagtggcaaagaacttgggctggattgtgtttgtgttctagtattttgtggaaggtagaacttgcaacagtggaattggacattcaactacagtggtttctaagcaaagtggtgaaggagtggtttggctccttctggctgctataataaaatgcaaaaagagagaaatgaattgcagaaggaatagttaagcaaaagggaaccagaacttacttggaacattctctgcctgtgcatattgcaaaaaatgagaaagcatgtttggaagggaacaccaacagtgtggctgactgaccatataaggagggtagtgttggtgtgaaccacaggcctaatcagccatctcaatagaagccaggatagagaagggattatgcaaacagaaatactgccagctaggactaagggaaacagagaaaatgaaatggaataaaggaagactgtgactacgcattatccttcaagaaaggggaagaaggatccccccaaaggcaattcagtgatgatcatcagggcttctactctcatcacacccaccatgggtggcgatcagggagcaggctgtcttcacttcagtttcaaaggctaggaccactggcaagcagagttgtgtgggcagggctcttgcagagagccctgtggatggcactccactgagctgaaggggcagggccaccacatgaagcaatgagggtgacgctgccactcaagtgcatctggagagcagagcatcaaaccaagaaggattattttcaagtcttaagacctaaggggatttgccttgctaagttttaaacttatttgggacctatcagtcctactttccttctgatttctaccttttgagataggaaatctatcctatgcttacctcaccatggtattttggaagtgcttaatttacctggtttcacaggttcacagctggagaggaatgttggctcagaatgaatcattcctggtcttacttgtatctgatttagatgatataaaactttggactttaggcttcagaactgatgctggaatgttttgtcttttaaagatgttgagatggaatgaatatattttgtgtatgagaacatgaattttgtgggttcccgggcaaaatattatggacttaatgcttgtgccccctgctaattcatatgttgaagccctaccctcgaaagtgaggcgaggcctttgggaggtagttagggttagatgaggtcatgatggtgagccccccatgacgtgtccttaaaagaataggaagagaccagaacgtgctctctctttctttctccccaccaagtaagaacactgagagaaggtggctgtctgcaagcccggaagaacaccctcacatgaacattctggcaccttgatcttagatttcccagcctccaggactgtgagaaataaatgtctgttgtttcagccacccagtctaggtattttgttatagtggactgactagggttttgtttttattgagctgtagttctttatatccacattctggatttaaccccttatgatttgcaaatattttcttctgttccatgggttgccttttcactctgttgatagtgtcttttgatgcacagaagtttgaaattttgatgtagtctaatttatctatttttgtagttatggttgttatctgtgaacaaagccatcatagtttggtctaattgtactgaaagatttttttttttttttttgagacagagtcttgctctattgcccaggctggattgcagtggcgcaatctcagctcactgcaacctctgcctcccgagttccagtgattctcctgcctcagcctcctgagtagctgggattacaggctcatgccaccacacccagctaatttttgtatttttagtagagacaggatttcgccatgttggccaggctggtctcaaactcctgacctcaggtgatccacccacatggcctcccaaagtgctgggattacaggtgtgagccactgcacctggtctgaaagattatttttatgactttgtcaataaatggcatttggttaagatttattattattattattattaatttttgagacggagtcttgctctgctgcccaggctggcgtgcagtggcttgatctcggctcactgcaacctccacctccaggattcaaccaattctcctgcctcagacacctgagtagctggactacaggcatgcaccaccacacccggctaattttttgtatttttagcagagatggggtttcaccatgttggccaggttgctcttgaactcctgacctcatgtgatccgtctgcctcagcctcccaaaatgctgggattacaggcatgagccactgcccctggcaaaaataacagattattaatgcaatgtcttctttgttacctggaactggcctttagttttaatgatatgctgtttactatttaatttcctactacaagctacatttgaacccacaaactgacaagatgagttcaggcatgcttaatgaaatgattcaatgctggtttattctgtggtgagtgatggagaactctgaacaatctgtagcagtcaaacatacaaaaatcaatctcttacataccgtatagctacaaggggcattcaactggcaggtaagataagtttctttgcttcgagtcggactaaagcctttagatttagaaatagcttggcaaacacactaaatgtaagacattataacagattagcaaattttgattttttaatagttgctactaggtttttttcatttcttatttttataagtaatcctcttgtgaatagaagaagcctgcaaaaaccctctgctggtcaaagtgacaaagtattgccaaaaacttaaaaacaggtctttatgattcttcttcttcctcttttttttttttttttttttagtaagacagagtctcactttgttgcccagactggagtgcagttgtgtggtctctgctcactgcaacctccacctcctgggttcaagtgatttttctgcctcagcctcctgagtagctgggattacaggcatgcaccaccatgcctggctaatttttttttgtatttttattaaagatggggttttaccaggttggccaggctgttctcagactcttggcctaccaaagtgctgggattacaggtgtgagccaccgcgcctggcctttatagttcttaatggcttgacaattcagtactgtgaataagagaatgacttccattgcctcatcattaggtaattttttggaacaacattattccagtggatattgagtcaatatataaagcttgaaattgactcagagagctttaaatctgaccttctagaaaatataagaattattttttcattctaatgggaatatgattacgatgcctctggtacacattcagctaaaatttatttttggtttctacctccttagccctatgcaaaagaaggacacttctctttgctaagagacacgagaaattaagccttaagcccacaatttatgtgttaacaaatcaggaaaaaaactaccgataatctcagttactgatgaaaaggaactatttttatattaagttgtagtttacaagaaggaggtatatatcaacaaacacctgataataataataataatttttattattttttgtttgttcttgtttttgagacggagtctcgctctgtagcccaagctggagtgcagtggcgcgatctcggctcactgcaagctccgcctcccgtgttcacgccattctcctgcctcagcctcctgagtagctgggactacaggcacccgccaccatgcccagcttattttttgtatttagtggagacagggtttcaccgtgttagccaggatggtcttgatctcctgacctcgtgatccgcctgcctcggcttcccaaagtgctgggattacaggcgtgagccaccgcgcccggcctgataattattaaagcagcattccctttagccagcttcttcacaatgagcatgcttattgatcctttctctgtatcatctagaatggctcatttgagttcagaggatacaagtttggtaacattgaaatgaccatctagaacttaccaggcctgtttcttgtgggagggagttacttttaaaaacccttaaaggagataaaataaatgttattttatacttcctagatttctctcacaattgttttcttttaatgttactgggtactggcacccttctaacaacatgcccactattccatgagaagagggtaaaaatatttcattgcattttaaaagattaggtaggttactcagtatacttactcagtataccctttgtatagaaacaaagtgaaatatttaccaatctgcaagaattgccaaaatttatcaaatatgaatgacaaattaagtacaaaactgaaggctgaaatgttcttcagttgatattttcctgaaaggtaaggaaattttgcttttttattacccccaagataattccttggatgcttgggtgaaaactgagccaaaattgacctttctgcctctttttaaaccaatgtaccattgaaaaatctttctgagtcagtaactggattcctaaagcattcgctcttactctttttttttttaaaaaacggaggaaggtcctgatacgttgtctcaaactcctggccttaagcaatcccaagtagctggaattacaggcacaaaataccatgcccaggtgcaatctggtttcttgagagaccaaggaagcacgttgaaaaacaaggataagctaatctgataagactgaaaaagaattagagaaaaaacaataactactacaaaaatatcctacaacaaaaatgccgtaggatataatgaacaaacatacctcctgggctgtgaccggcattcttcctccccactgtctgcctcctgtatagacagaaaatgaaaaaaaaaattaaaacctgaggtttcatatcataatatcactaatataattttactaagtttcacatgttgtgtacttgaactaaattactcatgttgtatacttgaactaaattctcttcaaaaaaagtgacttcaaccaacccaggaagttgatgtcaatagaacttactcctggaggtaacttcaacagtagtccatgaacaaatttcattgacaatgaagtgctattcattaaaacaattacctccaaaaaccaactaaacatgttattttactgttatgctacttcagcttcaaaacgagtgggcattctgactaccaccaataaatctcatcaatataacctattaatgattctgacccccaaagaacaacctaaacaatgaacaccacttaaaagagagtgctcatgatcaaatcaccatcaacatcaacataatggctaccacttgttgagtacttacaatgtgctaggcactgtgttcctcaatttaagtacattactgtacttattctttataaacccagaaggttgatggtaccaattatttttaatttattcaaatacacacagtaacataggataaatcaatgtcatataaaagcactgatggttaatgacccacccagggatgccaaacaatgatgacaacaaaaagcactgaatcatagttcaattacaatatttatttcttcttagtgtggcacataaaataatagaaagtcttataacttatgtcaatttagactcaatgaatattttacagatgaagaagcaaaagggaaataagctgtccaaggagactcatgtggtaaagaattaaaacgaagaaatattgactcccagctagctgaaaaagcttatcatttacctctccttgccctgggttaaaaattagtatatgttatgatattatactgatcttcacagaggcaagaatattgacatgaaggaaaagtgaggaaagatgaagaggctttttctttaaatttgctccctgacaatttgtatttgttctctcatcacttttgccctatctggcaaacacagaactattaggtagaaggagaaaaataatctcagagaatatgtgtactgtctgcccaacaagtcacctgcattttcatttatgaagccatcctcatctacctttacatcattctgcctcctttcctgggcaaccaagcctagctctgtaactttcattcccatgtagctggaattacaggcacaaaataccatgcccagctgcaatctggtttcttgagagaccaaggaagcacgttgaaaaacaaggataagctaatctgataagactgaaaaagaattagagaaaaaacaataactactacaaaaatatcctacaacatttcattattcatttcaaacatgtctttctctctgtctctctttttttattttccacaaaggaagaacaaaacaaagattctgcttccagaaggagtacaggtagaaagtgtcatagtgtattacactctttgcatataagagagaggttttaggttagaaaggtatgccctttagagactgaaaaaaggtttaaaatgggaaagagctgtctctagaatcaataatcagaacctggaaagtttgcaagaatgaaaataaaagactcagataaacaaatgtaaatgttagatttttgtgcccaaagaactgtaataaatagaaatgatttcctggaatatcatttaacaaagagtgcttcagtactgttattattaatagatctcaaattataatgcagtcttctcacatttttttccttatcttttttttagacgttgtctcactcttgtcacccaggctggagtgcagtgatgcgatctcgactcactgcaacctccacctcccaggataaagcaattctccagtctcagcctcccaagtagctgggactacaggtgcccgccaccatgcctggctaatttttgtattttttagtagagatggggtttggccatactggccaggctggtctcaaactcctgaactcaggtgatccacccccatcggcctcccagagtgctgggattataggcgtgagccaccgtgcccggccacattattttttaattgcattaaatattatataagaatatgtttaacatataagttatgaggtacaataacaaaattaatacctatgaacaccattccacctaagagctataatagtaccaacactgttgcttctgtttgcctcttatttcccattcctctttctattatgtgactactatcccagtttatactttttttgtttccacctcattttattatttaaaaaatttcaaacataaaattgaaagatcttatagcgaacttgtatatctaccatctagattgtatcattaatattttctatacttttttttgagacggagtctcgctctgttgcccaggctggagtgcagtggcgcaatctcagctcactacaacctccacctcgtgggttcaagtggttctcctgcctcagcttcctgagtagctaggattacaggcatgtgccaccatggcctggctaatttttgtatttttagtagagacgggctttctccatgttggccaggctggtctcgaactcctgacctcaggtgatccgcccacctcggcctcccatggtctaggattataggcgtgagccaccatgcctagccaatattttctatactttttaaaaatcatatgtttattcatctatctgtccatctatccatcttattttttggatgcatttcgatttaagttactgatatcagtacatctgcctttaaatgcataataattaattagaattcagtatttctttatagttttttcctttctttttttttttttgtttagagataagatcttgctctgtcacttaggctgtagtatgtgcagtagcattatcacagctcactgcagcctcaaactcctgggttcaagcaattctcctgcctctccctcctgagtagctaggactacagatgcacactgccaggcctggctaattttgttctttatttttaagtttttgtagatacggggtctcactatgttgttcaggttggtctcaaacttctggtctcaagtgatcttcctgccttgacctcccagagtgctgggattacaggcatgagccaccacacctggccagttttttttttttaaggtaaaatttatatacaatgaaatatacaaatcttaagtgcgccatttaatgagttttgacaaatgtatgtgtctacgtaattcaaactgctatcaagaaatggaacatttccatcacctcagaaatttttctcacagccattcccagtcaaaatgtggcaccacccactcctgaggcaaccctgttctggttttccaccacagatttttgccataaaaaattagtacacaggatatgattccattgttcattaaatgggattatatactatgtactactttatgggaagatttttgaaaaatattcagcataatgttttcgagattcatcccacgttgttgcataaaatagcagttcattcctttttatcgctgaggattccatcacatgaatatacgagttcatttatttattctcttattgatggatacatttgggatatttgagtttttgcctatcacgaacaaagttattagccagacatggtggttcatgtctgtcatcccagcactttgggaggctgacgcaggaggatcacttgaagtcaggagtttgagaccagcctgggcaaaatagcaagacacagtctctaccaaaaaaataaaatagttagccagacatggcacctgtagtcctactctggaggctgaggtgggaggatcggttgagtccagaagtttgaagttgcagtgagctatgatcacgccactgcattccaacctgagagacagagtgagactctaaaattaaataaataaataaagctattatatgaatattcttttgtgaagtttttttttgggggggattgacataagtttttatttcttttgggtcacaagacagaggcatgtatagtttcatataaaattgccaggtcttctcccaaagcatttacaccgctttataccctcatcaacaatgcgtgagagttataacttaactctaattggcaattcttttcccctatggttattgttttcaggttcttaaaaacctttgcctaccctctagtcatgaacatattctatcattttttctttctttcttttttgagaaagtcttgttctgttgcccaggctggagtgcagtggtgggatctcggctcactgggttcaagcgattctcctgcctcagcctcccaagcagctgagattacaggcgtgtaccaccgtgcccggctaatttttgtagttttagtaaaggtgggatttcaccatattggccagggtggtctcgaactcctgacctcgtgatctgcccacctcagcctcccaaagtgctgggattacaggtgtgagccaccgtgcccagctcaatcttttatattttaaagaatgtctctttaaagatatcaataggccatatttttggcatatttgaatttttacagaaagaacatcataaccattatgattattatcgttatgcatattacataacctcattgagtgtttattctacactaacactgttctacaaatgtgagacagcattataattatcccattttaggaatgaagaaattgaggtacaaactggttgttgctttttgcccacagacagcatttgaaccttactttatccattatgacaatctttgccattaactgtggtgtttagtacgttaacatttaatataatttttgatattgttagatttgtgtccaccatgttactatttattttccgtttgtcgcctgtatttgtattcctctgttctaccttttctgccttctttggtattatttgaatattttttagaattttgttttaacttgcctattgggtctacctctttgcattatttattcccttgttttttaaaaaattacatatgcctacattcttaaacaatgtattactcatttttgattgtttgagggcttaaaaactgtgttatactgtgtgtagttttcccaatatgctttttaaaaactaaatattatcctgaaaagattcatctacttattacatatagctatagttcactcatttttgatggggtaaaattcgaatatatcatagtttatccattctatttacatagactagattgtttctatttttttggtgacatacacaatgctgctatcagcattcttgtacgtgtcttttggtgtacatgcaaaatatatcaacagtatatatacctatgagtgaaactgcagggtcatagagtaaataaaggttcaactttacaagatagtaccaaattattttccaaagtggttgtactgatttatactctcaccagaaagagtaagagttttagttgatctaaattctagccaacacaggatcatcagatgttttctatttttgccagtctaatgttttatctcattatggtcttaatttgctttgtcttgagattaactaatgaggttgggcatcctttcataggtttatgggctactactagtttcatagccttgcccttatttctaaaataagcacaccaaaagaaggataattcaaattattttcagttttttggtggatttttctacctatgagaattgtgatgagaatatgtggataagtaaaaagcaaaaacacccctgatgctttcttatagggcacaagcagccaaaaccagttatgtctacaggggtgaactacatttattgagtactacgatgggctaggtactttatatgttgtttcactgaatgggtaccacaccctatgggacttattcaaggtcataaatggtggagtcaggatttgaacgtgggtctatctttctgctataatcagctgcatctaaactaaaaatcttactttgatacttataacccaagatggcaattcagagggagctgaagaagaaggaatatcttttttcatggcttttaataaagtaatatcctttgcatctttcctctatgacttctacacttcaaagtagtgccaaaagcgtagaaaattcctttggctcccccaaaaagcaaatcagaacagtgtttttaacacaagatccccaaataattttttctttctttatgtttcaatagccagccaaatgaataatttgctttcccttctgtttacttcgaaaaaaaaacttgagggaaaaaaaaactaagcatatcaaagcattgtaggtcttagggtaaaatggatttaaaaggaatgaaaaaaatgttcaattatgttaatttcagcagaattcaccgccaaaaaagcaaagacacaacatttcttatttaataagagtaactatcgggtaatgcagttatcttgaacaatagcattcaaatggtagctgaaggtggaatgcttaccattctattctaacaagtgcagaaaccagatataacagcctttcttgtcaagtaacttcacacattgttactgaaaaatgccagtcaatctcttcaaaacattggaaattaccaggagaaaagtgtagagacagctcttagtttcttagtgaacagaataatttctgatacataacgagaatatctaaattaaataattaaataattaaataaattactaaatgtttaattaattaaacatttaattaatttaataattaaatgactaaatatttgttggcttttttatgatcaaatttccaagagccctattgttaaatagcttttaaagagtataattacttcttatgttcttaagaaaaaattgacctagaaacagtaaggtattacatttaattttagggtgttcaggaaccattaagtctttttttctttttttttttctttttttttgagacagagtctcactctgttacccaggctggagtgcagtggtgcgatctcggctcactgcaccctctgcctcctgggttcaagcgattctcatacctcagcctcccgagtagctgggattacaggtgtctgccaccaccccctgtaatttttgtatttttagtagagatggggttttgccatgttggccaggctggtctcaaactcctgacctcaagtgatccacctatctcagcctcccaaagtgctgggattacaggcataagccaccatgcctggctccattaagtattaattgaaagattaatgcattcttattaatctgtttactacctgatcataaaaacaggtcactaaataaaatatgtctggaaaatatagaagcactgaagtaatatttgctgagaagtaggcttggtggagggagatgctgtcagccttgaacactgggctagcagagtgttaagcaatattttcccaaatcttatcattcaagattctttacactttctatttgctccaatccaagtcatctcatttatcattctccaaacgtacctattgacttcctttgttcatgctgttgtatcaacctagaaagcccctctcccctctcctatattcttttccagtcttcaaagctagtttcaaacactagtagtttgtgacatttcttttatcacctgactgatgctctctgtctccctccaaacctaacggttgctgtgcatcatttttgcgacactaccagttctgtttctgggttacaactgggtacttgttttatctcccatcatcagattgtaatctccttaagggcaggaactatgcctcattgccctttgcatctcactctgtgtttagcacaatgccctatgtgcagatggaactcaataaagggtcgaatgagtgactggagcagctaactaatgccatgtgaatgcttgaagctaactagctatacattttctgctagtaaggactctatgccagttacattttagccttaccaggttaaaagaatggtttttgttgctcaggagtagcctgtggctaagatctggcagtaataccttaataccttacccaaagactatccttttggttaagcagacagaatcatttacttgatctcaatttttaaaacatattattttttttgaaagatgaggtctcgctatgtgcccaagctggtcttgaacttctagctttaagcaatcctcccacttcaacctcccaaagtgctgggattacaggtgtgagccactgcacccagcccatctgctctcaattatatattcattcattctcattcattcattcattcaacattcattgactacctattatgttttagatactaggcaccagggaatgaaagtaagcacaactgtccttattcttaaacagttagtattgtagtgggggagacagttccataaaacagaaattataacgatatgtcatttaggcctacagcaaaaggacatacaaaatgttatagaagcaacagaggaagaagtgactaactatggtgttgggaaatccttcacaaaagttaattttttggccgggcttgaactagtgggtttttgtcagatggaaaataagagtattggccaggcatggtggctcatgcctgtaatctcagcactttggaagtccaaggtaggagaatcccttgaggcaggagtttgagaccagtctaggacacatagcgaaacactgtttctacaaaaaaaaaaaaaaaaaaaagaaaagaaaaaaaaagtaagtaagagtatttcagggagaagaacaggcaaaagagctgaaaactgtagaagaatgagagtctgataaatttggggaagagtgagcagctgtggatttttcaagcaaaggtacaggtattgggggttaaggctatcaagtaatattactgttatgagtctgcaatgatggaaattccaagataacagttctatgatcagaaaagatggttatgaattgtcaattcactggatatcagattatccatcagttacctcagcccttggaaataaatgaatagtaggaggtatctatcagacaggaaaaaggaatctagtagtctttctaagagacatatgtgcttcgaaactggaagagataatgccatgcttctggcttttgaaaaaagcagatataaaacacacaggcttgaggaggaataaaggcatcaggtctgccacttggccacttgaaagagaaggcttagatccactgctagaaacagaaaaaacagctgtttgggttatctattgctttataacaaattactgctttattatattttatgattttatgggtcagaaattcaagcagcacttggctgggtgattcttcagttctacatggtattgctaagggtcattcagtgctattcaggtgatatttagttagcatatgagctggtatggaggatctaagcagcttcattcacatgtctaatgtcatagcctagatgggtggaaagctgggctcaactggaaatgtaaactggagtgcctaaacatgatttctaatttatcttgggcttcctcaaagcatggtatcctcagggttggtcttcttgaataatggctcagggctccaaaaggactagtcatcctaaaggctaggctcagagctggcatagtgtcatttctgccacactttattggtgtaccaaaaaagtccaacacagattcaaggaatctgtgagaggaattagattcccttcgcacaatagcagaagtaacaagaatttgcagccatctttcgaccctggtgattaattgaataagtagacaaaattaacaggacagaaaaacaggtagttaatgacagtgaatgaagtagagctcctaaagcctagggccatagagctatttaggagggcaaagcagctaactcttaggtcagtgcaaggaggactgaaggccatatggatatttttacaggttaatgtctataaagaagtgttctctttattgggaggctaaggacaagaaaggacctgcaagcatggcagtaaagacacacagtatggtccaggaccagagtgaatacctaggcactcataatctgagaaagctggtttggaagaggctcagacatgatcaaatcagtagttcccatataatctgaccttgttttaaagtctaatttagatcaagatatatagtattggctggaatcaggaatcagagattcaatttaatcatattttatagagatatgacatgcattaaagtaaaaacaaagtcagaggatcctggaatacttacaattaaaatcaaagtcacatcatgctcctattaatattatgacagggtttaagaaaccttaaataaacaaactttcttccctataattttcaagcaatagaaaacctctgtgagacacctactatttctctagtgtttcttttaaactcctttaaaatacaaataggtgtgaatcacagtcaggatggtcagcaacaagaaagcgagcttgattagaattttgctgaaatagctttgattctaaagaaaaaaaagtccttggacaacagctaatttaagagacatcacagtccagtcaatgccctatagaaaaatctgagctctggatgtgaaactgttactggatgtcttttgtcttcaatccttattccactttttaaaaagttatttaatgtgtgcaacctaactcacccacttgtgataatttcagagttgttatacagtcttttctatcactagagatcaaattcattggttttagaaagcaacaagtctttgttgttgttgttgttttttgagccagggtcatgctctgttgcccaggttggaatgcaaaggcacgatcatagctcactataacctcaaattcctgggttcaagtgttctctcgcctcagccttcatgagttcacaagtagccaggactataggtgcataccaccacatctggcttttttttttttttttttttttttgaagggggaagagatgaggtctaactaagttgcccaggctggtctcgaactcttggcttcaagtgatcctcccacctcggcctgccaaagtgctagggttacagatatgagctaccacacctggccataaaaggcaataagtcttacagtgttctgaacctgtcacatctgacaggcatgcaatatggaaacttcacaagtcactggttacctctgggtcccttttagaacttttttagtaacaaaaagctccaggcctcatgcctataaattattattattaatattattattattattattttcgagatggagtctcattctgttgcccaggctggagagcagcggcctgatctcggctcactgcaagctctgcctcccgggttcacgccattctcctgcctcagcctcccgagtatttgggacaacaggtgccaccaccacgcccggctaattttttgtattttttagtagagacggggtttcaccatgttagccaggatggtcttgaactcctgacctcgtgatccgctcacctcagcctcccaaagtgctgggattacaggcgtgagccaccatgcccggccctcatgcctataagttcttattctttagctctgacgttggtccgctggtgtgctggagctggctaggttgttagataacaattgttacatttttaggaaccttgtgagacacgtcggtagccaaggcggatgtgtttatcagcaaaatcagcaaatgccacacatgagcccctgcttagaaaacaggcttttaaacatttactagcatacaacaagttgtggggcctcggaatcagtacattaaaaaagctctgtagataactgataagcagttaagactgaaaacctttggcttaaaggtttggagaaacaacatcaaaaagcccagggtacacatagcctctgcctactcaaggtacctgtgctaggtaaccaaggagagcagtatgatcatagaaactcagctatcaaaaaaaaaaaaaattcccttcctagactgtaagctctgtagagcaggactatgtttttatagtgctaagcatacagaagatgctcagtagatattagacaaattaataaatgtggttcaagatttcacaaccagtaagtggcaaaaccagaaataaacttaggctaatttcactatattttgtacttttttcctccattaagttattagtcatatacttggtttgccaatccaagatgagtgcttaaatatggggcagacagcatgcggcacccatcataagatagtaagaagactctgcctctgtgtcattctcttgtttgccagaaccagaaaagtcaacaaagtctcttcatgattattgtctcatttgaaccactccggaatgaatgccatgtaggtatgattatagccttatttttcagttgatgaatctgcctcatggaagtgagataatttgctcaaagtaacctaagagtacacagccaagtcaggattctgtctgaaaaggtcaaataacaccttctaccagaacaggttgctcctcttgtgttaaaggaatgctccagattctgctcccttccattcaggtgaaattccagatcccactttctgaagaccccacacttggtccatttccttcattgtagcctgagccctcaatatggacatagagtcttatgttcagccaatacatactgatacagctgtactaactgttaaaatattgaaatagtgactgcctggagcccctctgagtgtgtcatgatccagccacaaccaggtaaatgcctagtgcagcaggggacgtccaggtcttgctcccatcttttctgattggttgatggctataccatactagttgtgaaatattttgaatatctcctcctctacttatagccacatctcttctgttctctaaactttggtttaaaactcttaactgtgatcttagcttcacctgggggatcctacctgtatgcctcttttgcccatatatgttttcttattcgtctgtcctaccagctataccaattgcttagcctggcatctgggtttagcaccaggcctctgctacacgtgattaccacgcttccacaagaaacttaaacaatgagaagcactcataacacctggaagaggctaaataaaatccatctgttatgtttcttgtagcattaaacattctaattgttcatggatataaagaacaagaggactaaccaaggttacaaaaggaaacattatctagaaataaggacgaagaacatgtaaagaaggataatgaagcaacaccgattacttaacaaatactcctaaatgaacagcataattttctcaaactttctaaaatcactttcaaactacaaagtagggaaatacagttagtggcccaagtaaaaaagaaattagaatatttaagatgtaggtatactgctaagacagttttcattagggggaaatgaattgttactacgttaatattttactatttatatttaaatctagacaattaccttttcagctatcaatagaggaaaagaggatattgaatatctctgaacagcaaataatcaatatactcactgagagctgctggagtctataggggacacagaaaagtgtgaaacagtaccatactcaaggagttcatctgcctgaaggggagttcatctgcctgttttatctgaaaagttgttccaaaatatacagtataaatgtatggcacaggaagtacatgtcacaggaattcagaagagagatgaagaaaagggaagagcagtagaaatacatttgacatcttggagtggcagtgaactgactagctgagttaaaacccagagctttccttaaggtaggctgcaaagataagctgcaggagacaggactttgaacctgatcctatgaggtagccagggaaggtatttattagcatcttagaaaattataaatatgttgttttgatggctttttttttttttttttttttttaggaaacactacaatttggaaagccaatcgagaaaagttaggtagtttttccaaagccagtgacactgctaatttaactatgggcctccactagagggcagacgagtcgaagcttacactgtggttgaactggagaaagcagtgcattcatagaaaattctgagaaaattattttgtttaaagaccattttcagtgccttcaaacttggacagagtctttagctagcagatcagtctttcacagaaaatctttctgtggtataaaatgcttctttttttgttttgtttttgagacggagtctcgctcttgtcacccaggctggagtgcagtggcgcaatttcggctcactgcaacttccgcctcccaggttcaagcaattctcctgcctcagccttctgagtaacagggattacaggcgcccgccatcacgcctggctaatttttgtacttttagtagagacggggtttcgccatgttggccaggctggtctcgaactcctgacctcaggtgatccgcccgcctcggcctcccaaagtgctgggattacaggcatgagccaccacagccggcctaacgtgcttcttaattgcaaaatagaccagtagaaaagttatactttgggagtctggctcagctgacagccacatgtgcttatatgtggtaggcatatctggaatgccaacaacagcactcatcactgactatcttacctcaatcttccccactcatctcaggcacatcctaaccaccacccaagttgatgtctaactatgtgtatactatctggaccataatttcaatctagattttccttttcattttggtcaactggggaagttctttatccctttaaagtcagaggtaaggtgaggccactagacaaagactctgatatgtgcatttgcctcagcaggctgaggagctgttatatggtggagtgggggttggtaggagccttcagttctcattaactagaacacaaggtgaatgataacaactaaataaaaaggttgagaatttcattaaacttttgagaggctaaggctagattttgtaaagtactataaactcctttttctgctttgatctcttgtcaaaaaaagatgtatgagcaggctgggaatggtggctcatgtctgtaatcctgggactttgggaggctgaggcgggcaggtcacttgaggtcaggagttcaagaccagcctggccaacatggcaaaacttcgtctctactaaaaataaaaaaattagccatgcgtggtggcacacgcctgtagtcccagctactcaggaagttgaggcacaagaatcacctgaacccaggaagcggaggttgcagtcagctgagattgcaccactgcactccagcctgggcaacagagtgagactctgtctctaaataaataaatatgcaaaagcaatcctatttagtagcttgatagactgccattagctggaagttaattttcctctactcctcaccagtgttagtatcacaagtattttcttttacccatatcctacaaaatgatatcatttagtttcagatataggtacacttcaactgcaggtgaattttgctgtacttaaagtcttgtagtatctctaacataccactccgtcttgtctcagactttactgttccctctgcctagaatacccttcattcccccttttgcttgcctacttctattaatcctttattccctcattcatgagatgaaatctaactctgaagcccagactgcagggcagtggtgtgattatagctcactgcagccttgaactcctaggttcaagagattcccccacctcagcctcctgagtaactgagactacaggcacacaccaccgtgcccagctcattaaaaaaaattttttttagagacagggtctcgcttggttgaccaggctggtttcgaacacctggctccgagcaatccttccacctcggcctcccaaagtgctgggattacaggcatgagccaccccaccagccctacttatcttttagattggaacttaggtgtccctttctccagaggccttccttgatccctctaggactgggttccacggtctttccaaatacaaccatactccctctacagttctctagtgtagcaattctcacactgcctgtttacttgttggtctccatattataagcttgaaggcaggaactgtctcttgatcactgctgtatactcagcacctagcaatgctgaataaaaattttgaataaatgactaatgtaaaagaaagaacaagtattgtaggacagattctccaaccaaggtgccccattttctataatgtagattcagtctgcaaacaccctgatttaaaatacaaaaagatagtaattcctcaaacaagaatattcttagctatagccatcccacattttcacatacgcaaccattttagagactgcacaacagaattctcatagaaacaaagatgaatgggtcaatgttgtcaataataatcataaattagggaactaatcatcatcatctgcttttagaagtgggttctatttattttattttagatagtcatatctagcaatctttatagcttctattttttaacttgcatatttaaataagtttcccagaaaatagttcattaattcatctacaatttattgtggtatatggttgaagatagagctatctaacttaattttctccccaaatagttaattgttattacagcactacctggctatttatccattttccccaactgacttgaaattctaccttaatcatacactaaatattttcatgtactaaggtctatttctgggccttctaggcaacatctttcttgtacaccatgctattattagcttataattgttttcaatatgtgactgtgagaatctcatcttttaattttgagtgcacaatttcacccacttagtcttccaaatgactttgttaggttttcaacaccctaaaaatccctttagaacaagcttgtccaacccatgcccagaatggctttgaatgtggcccaacacaaattcgtaaactttcttaaaacattatgatttttttttgtaattttttttctcagctcatcggctatcattagtgtattttatatgtggcccaagaaaattctttttttgtttgttttttggagacagagtctcgctctgttgcacaaggtggagtgcggtggcacaatctcggctcactgcaacctctgcctcctgggttcaagcgattctactgcttcagcctcccgagtagctgcgactacaggtgcgcaccaccacacctggctaatttttgtatttttagtagagatggagttttgccatgttggccaggctggtgttgaactcctggcctcaagtgatccatcctccttagccacccaaaatgctgggattacaagtgtgagccactgtacctggccaggaactttttaatattacatttgattatattatatattacgtaatatataatggttattgccggcaatatacaatagcaaatcatttctatatatttattttgatattaactggtttattgcagttttaaaaaataaatttttatatattttttcatttaataatcacttttcaaagagtaaaaatgtaaaaagctattcattgaagttacgtaaacaagtgcttccactcacaaataagatagaaatacttataaatgaaatgtgaaccacaagtttttttttttcttggagacagagtctagctctgttgcccgggctgcagtgcactgttgcgatcataccttactgttgtcttgaacccctgggctcaagtgatccttccacctcagcctcccaactagctgggactacaggtgtgcaccaccatgcccagctaaattttattttttgtagagacagagtctcactatgttgtctaggctggtcttgaactcctaggctcaagtaatttgcctacctcagcctcttgaaatgctgggacaggcatgaaccaaataatttaatgcaagcttcaccacctaattctctaagaatttgtataatctcaagtataaaaatatctaaagagtttgattttctatcgactattttaatttacatttaaatatatttatgatttttatataaaagaggagattacatatatccaacataagaactgttgtcagggagcaagtggtaatacttatctctaaccctcatgaaaaataagaaaaaaagactcattcattaaactgtgaaccttttgaaacagggactgtgtcttatttttataccctgatacctggccatagtatgtgttctttttttttttttttttaagtcttattgagaaataattcatataccatacaattcacctattaaaagtatacaattcaatgtttttagtatcttcacacaattatgttttttaaaatatatatttctgcctttttttttgaagatagggtcttattttgttgcccaggttggggtgcagtcacacaattttggctcactgcagcctctgcctcccagactcacgtgattctctcacctcagcctcctgagtagctgggactacaggcacatgccaccatgcttgactaactttttaattttttgtagagatgacagctcactctattgcccaggttggtcttgaactcctggattcaagcgatcctcctgccttggtctcccaaagcactgggattacaggtgtcagccactacgcccagcctatttatgcattttaaaaccatgccagccgggcgcgatggctcatgcctgtaatcccagcactttgggacaccgaagcgggtggatcacgaggtcaggagatcgagaccatcctggctaacacggtgaaaccccgtctctactaaaaatataaaaatttagctgggcatggtggcgggcgcctgtagtcccagctactcgggaggctgaggcaggagaatggcgagaaccaggagacggagcttgcagtgagccgggatcacaccactgcactccagcctgggtgacagagcaagactccgtcacaaaaacaaacaaacaaacaaacaaaaaaccaaccatgccatatattcaaaaccaaaagtgtatacagagagagggagaagaaaaaataaaaataaaaaacaaaatttaaagtccaacgaaaagattttcaccgtatataaaagaatgaattaatagtctcaacgaacaaggaattccaattagaaaaagataaacaccaataaaaaaatgggggcagggcacggtggctcacgcctgtaatcccagcattttgggaggctgaggcgggtggatcacttgaggtcaggagttcaagaccagcttggccaacatggcgaaaccccatctctactaaaaatacaaaaattagccgggcgcagtggtgagcgcctgtaatcccagctacttgggaggctaaggcaggagaatcgcttgagccctgtaggcggaggttgcagtgagttgaggttgcgcaccactgcactccagactgggtgagtgagactctgtaaaaaaggcaaagactagaagcagataattcacaaaagaaatacaaatgaaaaggaagtgaaaatgtttagctagaaatttataaaacaaaaaatttaaaaaacaaaaatccaaacaaggatgctgtactatattttccctaaaaaaatcatttaagcagccgggcacggtggctcacgcctgtaatcccagcactttgggaggccgaggcgggaggatctcttgaggtcaggagttcgagaccagcctggccaacatggtgaaaccccgtctctactaaaaatacaaaaattagccgggcgtggtggcaggtgcctgtaatcccagctacttgggaggctgaggcaggagaatcgcttgaacccgggaggtggaggttgcagtgagctgagattgcgccactgcactccagcctggaagagaagagcgagacttcatctcaaaaaaaaaattaaattaaaatttaaaaaaaggctgggcttggtggctcatgcttgtaatcccagcactttgggaggccgaggagggcggatcaccaggtcaggagatcaagaccatcctggctaacatggtgaaaccctgtctctactaaaaatacaaaaaaattagccaggcgtggtggcgcgcttgtagtcccagctactagggaggctgaggcaggagaatggcgtgaacctgggaggcggaggttgcagtgagctgagatggcgccactgcactccagcctgggggacaagagtgagacttcgtctcaaaaaaaaaaaaaaaaaaaaaaaggccgggcacggtggctcatgcctgtaattccagcactttgggaggccgaggtgggcggatcaccaggtcaggagttcgagaccgtcctggctaacatggtgaaaccccgtctctactaaaaatacaaaaaattagccgggcgtggtggcgcgcttgtagtcccagctactcgggaggctgaggcaggagaatggcgtgaacccgggaggcggagcttgcagtgagtggagattacaccactgcactccagcctgggcgacagagcaagactctgtctcaaaaaaaaaaaaaaaaaaaaaaaagaaagtcatttaagataaaacaataatatgcaatactgtcgaaggatcaggaaaaatgggcaatctgtatcaacagctttagtattgaccatgtttttgataccttagaaaaatgcattctaataaaagaaatcagatatcatcaaaggtttatgcagactattcataatggcaaacaaactgtaagccactttaatgtacaaaaaccgggaagttgagtaaattaaaaaactgccacgtaatagaactttattaagccattagcttatattgcctaagtattatatatttaaaataaaaacatgagcagaaaataataattactggggaagaagcaggtttcttctggtatgtgaattataaatgattactttcttatatatgaccatctatattttctaaacttcctacaatgatcatatattacatatattataatgggaaagtgaattagggatggggaaaatgtataaattactgttccttttctttcttttttttttttttttgagatggaatttcactgttgatacccaggctggagtgcaatggtgtgatctcagctcactggaacctccacctcccaggttctagcgattctcttgcttcggctacccaagtagctgggattacaggcgcccaccatcacacctagctattttttgtattttttttttttttttttttgagacagagtctcgctctgcccccaggctggagtgcagtggctccatctcagctcactacaacctctgcctcctggattcaagtgatcccctgcctcagcctcccgagtagctgggattacaggcacaggccaccacacccagctaacttttgtatttttagcagagatggggtttcaccatgttggccaggatggtctcaacctcctgacctcgtgatccgcccgccttggcctcccaaaatgctgggattacaggtgttagccaccgtgcctggcccctattttttgtattttttagtagagacggggttttgccatgttggccaggctggtcttgaactcctgacctcagctgatctgcctgcctcggcctcccgaagtgctgagattacaggcatgagccactgtgcccagcctgttccttttcttaattagatgtcttatgaggtattaggtagatgaatacacatatcatctaaccaacgttttaagagagacttaataagttggaagatcatcaacaagtgaaagcctctgctggcaggtggctggctacctaaataaatgacactctccctttcctccttctttgtacagcagcttctaatctcctgctacagccatgtgaactcagctcaaattcacaatcttttctatcctattcaatgtcctttttctctagagccctgattgtttattttttattttttttctggggcggggggatagagtctcgctctgttgcccaggctggagtgcactggcgtgatctcggctcactgaaacctcagcctcccaagttcaagcaaatctcacgtctcagcctcctgagtagctgggactacaggcgcgcaccaccacatctggctaatttttgtatttttagtggagacagggttttgccatgttggccaggctggtcttgagctcctggcctcaagtgatccacccacctcagcctcccaaagtgctgggattacagatgtgagctaccatgcctggcctagagccctgatttttaaactggggtacaagtatcccagggtcatacctcagtgcggtagggattatggaagccaaagaacgaatataaagtttattctcagagcatcaaatttacttaacgggaagtaatatttttatagtaacagatatagaggtagatctatagagatatattcatttacataaggcttaaaataaaccataaaaattcaggtaatgggctcctttaaattttctatacccagactgccaggggttgcctattcactctccactactgttatagaaatttcttgtggaaagatttgagaagcactgcagaggattgttgtatgtaactttaaaatcaagcctgtgtttaattaatattgaacaattaagacataagctaaatgttagggggtatggtaggttagtagatatgaagagaagatcggatgcttaagattcctaggtctaattccttgatctagttctaggactgaaggcatgtcacttaactttattgggcttccaatacaaaatactgaaaaagaagattctgcacttaaaaaaaaaaaaaactcaaagcctccatgcttaatttacggaaatgaaggagaaaatttggagtcagaaatcagaatgtgatctcatccctaatataaattaggcctagctagtgatccttgctaacacactggaaatcataaggagaccaattactaacagccttttgcagttaaacactcctggttttattaatgaaaataaatgacagaagaaaaaattaattggcaacttaatacaggaagattttaattatacttacagaactattaaccttgacaacccaccagctcatgtataataagaaagcacctccctcactaatataaatctaagtaaaactacacgaatacaaaatattatatagagaagggtaaaatctcctgagaagcactctgtcatctgaatttcctctgcaatttgttgaaaatcagcatcatgcattgtcagcttacagaccactaaagctacctcaaaagctgctccgctacatatttaaaacaatatccactgtttttctttaacaacttccacactgtcctctccattctctcctccaacctcactcttacttccttaaggctcccatataccttaccctcccattttacacaagcctcatgaagttctcttcttggacttctttgtttttatcttgagattactttagaaaacatttatgatctaaagtctgagaacactttattgatgcatcttatccccttgaagagagaagaaatggttataaccaacttttcaatacaatcctttccttctgccatcctcagggagtcataatatgcttcatccatgatactcaaagtcattagaatttttataatcaagctaaataactacaggaagcctatgatgatacagtcatattattctgctaattatcctacattatctattagtaatacagagtcatccctccatatccatgagggattgtttccaggaccctccttcagataccaaagtgagtggatgctcaagtgtcttatgtaaaatggcataatatttgcagataacctatgaacaatctcttgtatactttatttatttatttatttgagtaggggtctcgttcttgttgaccaggctggagtgcagcagtgagatcatggctcactacaggctcaaactcctggactcaagggatcctcccgcctcagcctccagagtaactgggactacaggcatgtgccaccatgtccagctaattactattattattattattatttttgtagagacaggatcttgctgatttacccagggtgggctcaaactcctggattcaagcaatcttcctactacagcctcccaaagtgctaagattacaggcatgagccactgtgcctgcctcccatatactttaaatcatctcaagattacttataatacataaaacaatgtaagtgctatataaatagttgttatgcagtatttttatttgtattattttttattattgtattgctattttttaaattttctgaatatttttaatccatggttggttgaatctaccatgggtattcttcctttttttttttttttaagagatggattcttgccttgtcgcccaggctgaagtgcagttgcgtgatcttggctcactgcaagctccgcctcctgggttcatgccattctcctgcctcagcctcccgagtagctgggactacaggtgcctgccaccaagcccggctaatttttcgtatttttagtagagacggggtttcaccatgttaaccaggatggtcttgatctcctgacctcatgatctgcccgcctcagcctcccaaagtgttgggattacaggcataagccactgcgcccagcccgccaagggtattcttaaatctagatctgccccctccccaaaactgaacagagctggggagaaaaaggaagaaaaaatggcaaacaacaaagagcaagatgagtacacctgataggaagccccctcctttatgtcttattctaatataaatgagagtaactttgaaaacatctatccttattgtcattagttaaatattttttttcatgagaaacttgtacagtcccaatagagagttagctgtatgtataaattaaaagaatcaataaaaggcaccagctggccatcccaacactttggaaggctgagacggaaggactgcttgagaccaggagttcgagaccacatctctacaaaaaaaaaaaatttaattctttgtttaaaaaaaggcaccagtggccaggtgcagtggctcacacctgtaatcccagcattttgggaagccgaggcgggcggatcacctgaggtcgggagtttgagaccagcctgaccaacatggagacaccccgtctctactaaaaatacaaaattagctgggtgtggtggtgcaagcctgtaatcccagctacttgggaggctgaggcaggagaatcacttgaaccggggaggtggaggttgtggtgagccaagatcgcgccattgaaaaaaaaagcaccagcaatttcataaaaatgcaattcctggaagcaaacacaaatgtagaaaagcattccccaagcatatcctggggtcagtaaacactttccttgagcaactagcaggaaatattacttgcctaatttcctaagaagcataactttcctgataaacaatgccttgaacagcccatgaaaggaataaccaaggctactaagcattggtaaaatgaaacattacacaaaactattttgtataaaataaatagtcaactgaaaatatggaataagatggtagttataaagtatgctgcagattaaaaaaaactctcaaactatcagagtaaattgagatggcacacaaaatggtttcgttctatattttctgcaagatctaagacactaacaataagaaaaactaagctttgaagaaaatcaggaatagctttcagttctatctatgtgtattatgtgaacacgtgcacattcattatcagtccaaagtgcttccacagagactctgctttttataaagtgataatttccaattttcctatgtttaaggagtcacagaattgaatacttggtatgcacaatccactgggaagtaggcagtcattaatagaccattacctgggacaattataaaagctatgtaaaaatattcagatctgatcctcagcctttagaacaactgcaatgaatagataatacttaatcaatgttgagttcataaatacttctttcttggcctgtaataaggaaaggtttaaaatattttcatataagtaaaatataagaaatatttaaaaacatttttccagtgaagtcaaacaaatctactttttaaattctaaatttaaaaaggtgtactcatcttgctctttgttgtttgccattttttctattttacgtgaaccagtcccctcacattttcataccagggaggatgggcaaataattccaaaggcacggttcttgtccttgtactggttaaagacctaatgataataatagctatgtgaataatgtaaagagtcaaagtaaatgtgaactaaagggcagaacacagattgtaaacacctaatttttgtttcatacttcactttaaaaagcctgtgtgagcaaagaaagatctgtttctgtattggctcttaacactctaagattctgcaaaattaattcaccacaggaacatgggacatgtccattcattcaagagctatctcttaagtttctccaggcactgtgctagctgctggtataaaacagatcgagtccttgcttcagtctgatgaaagaagcaatcaaatgaacacataagcaaaagtaaaattacaactacaaataggaaatacaatactacttctggtgttggtaatgcatacacactgacagcataccccatgtctaaactcttatgctatctacagtaaaaactcccttctagaaagtattccccagcttcctttcattcctcatcatctgtttacagaataaagcaaatttaaacaaaacatgcacactgaatttctgatacaaagagtgctgccctggagaccacctcaaccagaggccatgaatgtagactttagatttttaattctaaagaagtctactagaaaactagctagaaataaaaattccaatacatatgcagtgcagattcgattaaattcagccccttgtcacctctctcttcccaggggtacttggactatgcagaaatttctgcctcttctacttgggggaatcaaccgtaagaactccagacactttcatttctctcatatgccctctaaaagcatctgaagagtccatgaattccaaaccatatcaagttattcttagcactgcatcccagggaaatatctcagtcaaaaacatattttgttttgaccccctttcatcaaagacttggctcctgcttttcaggaagaaaaataatgcaaaattcaaagtctctgatcttcaactgggtataagccctcctttcctaaagtcctgttctttcttctcgcctttatcttcttccttgtattataaattacatgcattcacatcttatttatttatctatctatttatttgtttatgaggggggtctcactctgttgcccaggctggagtgcagtggtgcaatcatagctcactggagctttgaactcctgggctcctcctgcctctgcctcccaagtagctgggactccaggcatatgccatcacacccagctccatatttactaagagtaaagcacttaatgggtactcaacaaatatttattgaacaagcgagttattggagcaaataaattatgaaaaaaaaaaattctaagtaaggaaagggaaaaatcagtaaggacttaaaaatgatgaaaaaccatggagtaggaaaacttctgatacagtatacagcttttaaggaataaaaatccaaccaatcaactaacctgataaccaagtctatttttttttttttttgaggtggagtctcgctctgttgccaggctggagtgcagcggcgcgatctcggctcactgcaacctctgcccccgggttcaagtgattctcctgcctcagcctcctgagtagctggggctacaggcacacgccatcacgcccagctaatctttttgtatttttagtagagacggggtttcactatgttggccaggctggtctcgatctcttgctctcgtagtctgcccgcctcggcctcccaaggtgctgggattacaggcccgagctgccaaaccaagtctattttaagaatcaaaagaatatctataaaccttggaattcatggtcataagaaactggaaacatgagctaaacagtaacctgggtcaaatttgtagctaagtaagggcaaaggccacacttaatatgatcacagatggaaccagattcatcagtgtcttatcattcaatgcatttgtcctgtgaattcaaagatgctgctacctctgtgtacacaagcccatccccttcagcatctccagtgataagtgacttaccaggtcacctgagactggcatttagtaaatgagtactgcacttccttggcttcattaagttaagcaaattttaagatatgaaaagatatttctagatatgagaatctactgttaaaatgatgtcatataatcattgaaaaaaacttcgtatgagccagggacccttttttttttctttctgagatgaggtcgcactccgtcacctaggctggggtacagtggcacaatcatagctctctgctgcctcgaattcctggactcaaggtatccccctgcctcagcctcccaagtagctgggactacaggcgtgtatcactacgcctggctcatttttaaattttttgtagagacggaatcttgccatgtttcccaggctggtcttgaactcctgggctcaagtgatcctcccacctcagcctcccaaagtgctgggaatacagatgtgagccacctcatccagctgagccagggactcttaaactttcctttcttctggtcctagtttcctccaattcctatttccacaaaagcaactttaacggacagtactcttggctttcctggctctagttctacgcaaatatcacgatgggagctaagactgaccatatttatcactaataaggtagggataatcttcactacctaatcacatctgcaaagtgaattcactgtactgtgctgtggtgtcagtattagtggtgaactgaaaattttgtttacaaaactcaaagagtttgggagggatagcagtgtgcctgatattttttcctcaaaatacaatttttatcagattgcatttgaaacctaaaaagagtaccagagaacagttgtgaaaaaataaacttctttagttctattccactgaaaattaaaataaaaaacatctatatagatgaaaggcagtatagattataattagtaaaatatatacattatagaaaataaactgactttctgtgatggcaaagttgctttaatcagagatgtctttgaggagtttcatgtaatatattcaaataaataatagtttcatattttttaaaaacatatgaggcattggaaatattaattttgtgacagtttacaaaatgaaatacaggtacattttgggtacatatgattacaaacttatagaagaatttccagaacagtataaagcaggtattttcttcacccacctcaggctttgacccttgcactgggctaatgttcctctgtgtggatgatgccttccttacattcctccagctctaacaccccacattgggccaccctctaatcccttctctctgcagtaactccctcaccctgcttaggctctaacatcgaactccagggtacctcccccatgcggatgccctcctaacccacttgggcaccaatattccacactggggtcgggtgcggtctcatgcctgtaatcccagcactttgggaggccaaggtgggcagatcactttgaggttagcggttccagaccagcctggccaacatggcgaaaccccattgctactaaaaatacaaaaattagctgagtgtggtgacgcgttcctgtaatcccagctactcgggaggctgaagtaggagaattgcttgaacccaggagccagaggttgcagtgaaccgagatcatgccattgcactccagcctggacaacagagtgagactctgtctcaaaaaaaaaaaaaaaaaaaaaattccacactgggccttgctgcccactcaaagacatctattttgtttaatcccatctaaaggcttttatactgaattgctacagaagaaaggtgttttattttttagtgcttaaattacaaatacaaataaagacaactgagcttcaactatgtacaaggcactgttctaggtctagtggaactatatagccctctaagagcttctttcatgactgaggaacccacaacatctctacttactagtcatgatatttttcagtcacaagtggtaaaaacaaaaacaaaaacaaaactacctgaacatgccttaaataaggaaaactatcatcttacataacaaaaggaccacagttggttacttcagtggctgaactttatcaaagatgcagtttccctatctttgtgctatgccatcctgattgtgtcagcattgctctcaggctaatatggcatcacgatgactgccacagtcaaggttcatcacatacatccccaacaggccctgagaaaaacagaccctcccctgtgtctttttaagtgcaaggaaaattgtcccagaagcctcccagactcccaagcttcccctctcatttcactgccctgaagtggatcacatgctcatgcctaagccaacctctggcaaggggatggcaccctctgactggctgggtctaatcaggattcatgggatagggcttggtcagtttcccttgaggtattcggctacctggaggaaatggatacctaccaacctgaacaaaaccgagtttttaggaatggcagtagagaatggatatagggtattcaacctgctgtgtctgctacagacaactgtgcctgtagcatagctgtacactttacaactttgaatttatatgtaatgaacatttgttgtttttgcctgccccatcaattcctcttctgataataacttattttcttgcagggaaccatccttttgtattctccagctagaactactgaagaaaaagatatctttccattagggtggcttagctgataaaatgtacaactagagttatagatggctgtttttttcattgccttatagggagggcctgtacaaaaatgaaaccaacatagaaaaaagcagaggtatgtggtgaagagagattacctcgatgaaataatttgatgccctgaatccagtcataccttaaatttatcccttacacttcccagttacatgaaccaacaaatctttattttcctacggacagtttctattactctcaatcaatagtcctgacaaatacattatataccacattttcctatgtgcacaatcaaggagaagtaggagaggaagagaaatgtttatttccttttagaggcagagaaattaaagtacccaaaggttaaatgacaggttagtatgttctgcccatgagaatatgctatccttcatgtaagctggagaatccaatacaaagattataataattatacaaatatttagcaaaatattccataaaatttcagtaaaaaaatttaatacattgcctttgaagtccaggattgcagaagtgggagaaaagatgacatgttttatgtggcatgaacaaatggcattgcccgtaatactctaacatggcttaaagaggatgttcatgcccacagagctcactgctgtctgtagtatatacttactttgaagactagagggaccttccttgatggttatctgacaagggctgttaatttcaaggcctcaatactgatactacatggctgcaaatcaggcttttgtttaatctgtccttgaaacatttctctattttcagatagcaaggcctggtcggaagacgccatcattgtcctgcccacataagaggaattgttatgggcaaggctagagtgcttacatagtgtctgagttttaaacacctgtcattatagactttgtcctgccacatgatacgaaacaaggcaaactataatttggtcagaggtcacagccctaaaagcaggtttagttcctgtatggtaaaccaggaaatactgctgcttacctctggcctactcttaattctgaacaagaatagctacatatattaaatattttaataacctaattctgtagacattcatgtttttagatgttatattaagatattttttcacctgaagtgtttagaaaaatttaatatagaacaatgtattccatacaggtattagtcagaggggctgcaaaaacacaaagcatcaaaatcttagtgactgaaaacaacagtttctcatttatgttacatgtccatcctaggttggtggatattctgttccatgttgttctctctcatcttgactggtcactgtgacagggaaaatggaatataatgaattatgcaacagctcttaagacttaaaagcttccacctagaagtgacaaaaaccacttatattttgtttgccgaaacagtcacatgaccatgtcagttcccaaggaaacataatcctaccagtatggagaaggagaaccaaaaatattgacaaatgcaaacgatgactacaatcatagataaggatattgtattatacaagatgctttcagttgcaagcaatctgactcaagagaaacaaaaaacatagtagtttatttaactggtaaattcaacagggattcagaaatgcattgatgttattaggtctttattttccactctttctctttgactttgctttcttcttattcttaggtagactgtctctgtgtggtggtaagatgaccacctaccacactaagcatatatcatccttttaatcagagtccagaaaaaaattaaccctttttacctccagagagacctatatccatctctcaaaatgacagtggccctgcttgggtcatgtgccaccataatatccagggaagaggagtgctttgattgaccagcctgacatgggtctatggacatatgaccatccagtggtagaaaagcaaggccgagtgattctcagccctaccagaatcagatggagtaaagtagacacagttcccaaaaggaaaagatgaagactataccaaaaggtagcagctacctaccaagagagctcgactttttcatttccttcatcattcccctcaactctgatgacatgtatgagactaaattccataaatataaacctatgtagtcttggtgtcatactacaaattgttgctgatgttaagccaggtcaattgtaaaaatacacactagggaacacatatgggtaaatgctgggacaaaacttctttaacttattttgcataaggcacttctgagtacaaatccaagcaagttacaaggaaattccctcttgcagaatgaactgctaacaaattattcttgagatgcttatataaatgataaaatggcaacatgattaccaggcttcttactagtaaaaggctcaaagaagataaatgacttcccagtcacagacagcatatagtagtgctaggatttaaatcccagtttgattgtttccttggcaggggcagagggtgaaatggtaacaggcatcagattactaacttcagaaggacagcaatttttgtttttgtatctcaagcaactagaacagtgcttggaacatactaagttagtgataaagaagcccaagaattaagctccttttcctattttaagtaatagtcaacagcaataaaaataaatttggttttctcactttgtcattcttctaaaacttggctaaacacatttccacaggaataaaatgcttggtttccaggaagttccaggtaatatgcattatgacttggcatatccctcagtatagctttttgaagctggaaaggacaaacacaaaacaatgaagaaataatttagggaaaaaataaatagaatgaatgagtacagaaaaaaaaaaaaccccagcatagctacaatatctgtaatgtgaatgtttttctaaatcaatataagccttaggttttagtagtaatgctatctaatacatttcttaaccattttaaagaggataattacatatgatagaacctctgcttaccttcctgccatagctgggttaagctgtatttctagccaattcctaacactctcctaattactagaacaatttagctgatgcttttggttcttcacttagagaactaagtaacagaaaaggcagccatggaggtagagccatcatgttagactagataaaggataagatacaaaactcacctgtatttacaaaaacagaattattgatcatctgtgaaccctgccatcacaggaagtctttaacaaattcagtaagtgatcttgattgcaatgaactctcattgactacacaagaaacttttaatttttcctttcgtagcacttggcagcaaaacccccttaagaatcctgctcttttatcttcttaagctacacaacaaatttaaatacaaagtaaagactttctcagcagggtctgaatctactgtgaacttttagaatagattcccaaccactcaaaactccctaggactcctacagaaagatggcatgctttaacccctcttcctagttccacaaaaatggatcaaaagcagaaatgtgtgttttagagaaaaggctaaagacagtgagaatccctggaagcaagtgatttgccaaactttaaagcagaagagaatacacattttctgggtaccaattccttagaaaatattaaatcagaagatcccagtttccaggcctagaattacatattgctgaatgaaataaatcaatggtatttaaatcctttgtgaagctagaacaatctattttggtaaagcagtttttggggagacattattaacatttcaaatactatcaacaattaaccttgatcaacctgaagctttgttcagcagtataattacagacgttacctagtattgtgggaaacaaagacacacagacatttccaagcaactaactacattctgtcatttcctgcaagtgacagaaccttttcattggtgtttgtgaaaagccagcttcaaagcaaaaccccagtggcgttaaagtaagcaacccttctgcttccatttccatctccaaatgacatttgtaaaattaaaccatatacatgtttctgtaccatttgagactagagtcctaaagtccattagtgtaggctagacaagtccacatgtgacccatgaatggagtgctattccatgagccacaaaaagtgggtggatctcagagggacatctgaacctttcatgagattgttagactgtaatagtggctgtttattaaaggctaacaatgtgccaggccttagtcgaagtgctctgcaaccattatctcatttaatcttcacactaatcctccctccaaggtaggtatactatttatcatttccattccttggatgaagaaattaagacagaagaaaagtaacttaactagggtcatatacattccttaccaccacaccataacaccatactactattctgccaacttcccttttattaagagctccattccctgacaagtgagttaaccaaactaaatcacagggatatgaagccccaactgtcgatggcttgtgtgtgtgtgtgtgtgtgtctgtacatatatatatggagagaggagagagggaagaagggagcctgggttcttccttcgctgctgtattcacatttccttgcctgacctctttcttcagggtatgactttagcttccatttattgtgtatacgttacctatcactcatttattcttcttttaaccaatatgtacagagtacctcctatgtgctagacattgtactgattgctggggaaatagttgtgctcatatagaagcccattctccatagcaaagacaggcaaatatttttaaaaaatctcaacctggtcactccccagctgaaaactcttcagtggctttttgttgtccaagaaataaagatcaagattttttttttttttttttttgagacagagtctcgctctatcgcccaggctggagtgcagtggtgcaatctcggttcactgcaagctccgcctcctaggttcatgccattctcctgcctcagcctcccgagtagctgggactacaggtgcccgccacctcacctggctaattttttgtatttttagtagagatggggtttcactgtgttagccaggatggtcttgatctcctgacctggtgacccttccgcctcggcctcccaaagtgctgggattagaggtgtgagccaccgcacctagccaagatcaagatttttgacttagtttataaggctgcagcatctggccttttgctgactttatcagcaccagcttgagttattttctcccttattttctttgttccagccttactgaccttctgtcagttccttgaatgtgccagtttcctgatctgtaagtttttaattcgtgtcttccccacctaacttttccctggttgacttcaactcatcattagagtacaactcaaaataccatttccccaagaaagctttcccttgaccatgaaccttaacatcactttttcccccaagccaggttaggtccctgattgctatattctcatagtattgtatactttccgatttgcagaattgatcataatttaaaatttcactgcataattagctgtttaatcccacctttctccactagagtataagtttcaaagggaagaatcatgtttatggtttatcacatgcaccaccatatcctcagcaaccactgcagtgtctagcacataggaggtactcagcacatattggttaaaagaataaatgagtgaaaggtaataatatacataagaaatgggagctaaggacatgcccttaagacataggggtcaggcaagaaagagtaaatacagtcagtgaaggagtacccaggccagttctgctctcctcttggtattatgcctggtatagctgctccagtctgagccagtttaattagttcaagatagagatgtagaaccagactagtggaaaccacaaatgggaaaggaaatgaagcagtagtgctttaatgcatgacaatgagagatggaggctgatcataagtcctgggcataactttgcatagtagaatttaaattattactacacagcaacattacatttgattaacgtgccagtggattttaatttttacttgttatatggagctcataacaggataagccataaattctgggtgccagaattgtttgatatagtcgtggctgctttgcagctcacctttaaggcatctagcagacccgggtgagggtctgctactgttaaagaaatttgagaaggaaaaaagcagttacatgtagaaagaaacctcccccaaaggacattgaacacgtctgcagacataacctatacgctactcagttccaaggctcttcacagtagcctgcagagattcagacttaaattgaggaggggaaaggtaaaaggatgtgtgtgataaaaacctctttctctcctgtattaacttagggcaaatacagtatttcctatattttcatctttaagattacaaataagagacgctaatctagatgtaagactccaaagaatcccagcttatttttaagtctaaagtgaattttaaaaattttcactgtaagataccaataaaacaactttgacacttcttgccatctcactaccagaatgcaactgtttatctttttttttttttttttttaagatggagtcttgctcttgttgctcaagtgcaatggtgcgatttcggctcactgcaacctctgcctcctgggttcaagtgattcttctgcttcagcctcctgaatagctgggattacaggcatgtgccaccacgcccagctaagttttttttttttgtatttgtggtagagacggggtttcgccatgttggcgaggctgtctccaactcctggcctcaggtgatctaccagcctcggcctcccaaagtgctgagattacaggtgtaagccactgtgctcagctgcaactgtttatacttaaggcctcttgtgtgttttcattcttcttttgttatttatttatatatagtttttatgtagttgtaatcagagcgtatatgtaagttttgctcatttttcaaatttggcaaggaatggactattctcttcttgtgccgcaactgtacctattatacacattttctctattactgtacttaccacactgtatttcaatcattttacttataaatctgtctttctaggctttgagcatttgaggataaaagctatcttctgttttttttgacatggggtctcgctctgttgcccaggtgagggtgcagtggtgctatcacagctcattgcagccttgaattcctggactcaagggatcctcccaccttagcctcctgagtagctggaatcaccatacccagctaattttttaaatttctggtagagatggagtctccctatgctgcttaggctgatcttgaagtcctgcacccaagtgatcctcctgccttggcctcccaaagtgctgggattataggcgtgagcctggccctgtttttcctttaagtaatgtttgaataaatgaatgatggctataaaattttgttctacccatttgtttcaagaaattttaaaatttctttcttaactgcttcattgacctgctggtcattcaggagcatactgtttaatttccatgtatttatatagtttccacaggtcctcttgttactgatttctagttttattccattgtggtcagagaagatacttgatttcaattttttttggttttccagttttttcttttctttttttgagacagtcttaccctactgcccaggctggagtacagtggcatgatctcagctcactgcaacttcccccaggttcaagcgatccttgtgcctcagcctcccgagcagctgggatcacaggtgtgcaccaccacacccagataatttttgtgtttttagtagagacagagttttaccatgttggccaggctggtcttgaactcctggcctcaggtgatccacctgcctcggcctcccaaagtgctgggattacaggtgtaagccacagagcccagccatttttttcttttactttgttaagactggttttgtggtctaacatatggtctgttcttgagaatgctccatatgctgagaaaaaatgtgtattctgtagccattggaagaaatgttctgtaaatatctattagttccatttggtctatagtgcagattaggtctgctgtttctttgattttctgtctggatgatctttccaatattgaaagtggaatgatgaagtatccaactattattgtattggggttcatctctctctttcactctaataatatttgctttatatatctgagtgctccaatgttgggtgcatatatatttacaattgttatatcctcttgctgaattaattcctttatcattatataatagtcctctttgtctctatagtttttgtcttgaaatctattttatctgatataagtatagctacccttgctcttttttggtttccattggcatggaatatctttttccattcctttatctttagtctatatgtgtctttataggtgaagtgtgtttcttataggcaacagatcattagatcttgttttttctctatttggttattctatgtcttttgattgcagagtttagtccatttacattcaatgttaatattgataagtaaggacttactgttgtcattttgttatttgttttctgtttttttttccttccttccttccttccttccttctttccttcctccctccctcccttccttccctccctctctttccctccttccctccctccctacttccctcccttccttctttcctccctccctttctccttccctccctccctccctttctccttccctccctccctctctccctcccttccttccttccctccctccctttctccttccctccctccctccctttctccttccctccctccctctctccctcccttccttccttccctccctccctgcctccttccctccctccctccctgcctccttcccttcctaccctcccttttttgaaagttattttctttgatgttatgttttaatgtcttgctttatgttttttgtgtatctattgtaggttttttgctttgaggttacccatgaaggttgcaaataatatcttgtaacccgttattttaaactgatgacaaattaacttgatataatattttttaaatatcagaaacacaatagaaaaatacacaaaagaagttaaatgactttcacagaagaaaaagatatacaaatggctcctcaacatttgaaaaaaatattcaatagttctcatatctaatacattgtttttacctctcaaacaggcaaagataaaaataagtctgatatcacattgaattggcaggtaacaaagaaatgatgaatgcttgacgtgattgaaaccccatttaccctggtgtgattattacacattgtatgccagtatcaaaatacctcatttatcccataaatatatatacctactatgtatacataaatattaaaaatctaaaaatattatagaacacattatgtattatagaaaatagctctttgtcatgtgttgaaagtctttttcccaacctgtggttttgactttgtttataagatcttttaatgtagattttttgactttatgtacttgaatttagcaatgttttcttttattgtttctgggttttgtgtcataaaaagatcctccctactctaagattataaaaaaattctcctacatgatcttccttgtggtgtcaaattttttacacttaattctcagatccatctatattttgtcacagagtgaggtagagaggcaacttaatttttttccattcatttaatattaattatacaatttctcatggaactatatagttttaattaagtttttcactttaatggcttcactatattaccatagtttacttaaccattccctcctctcattactaaaatattcattaaaattttagtacatatcctttttaaaaaatataatttcctcagaggaaatattcaagagttagatttctgggtcaaagcatttgatcattattataactcttgactaaaatgtcagattgccaggatcaagtcaatctataatctttacaaccaatcatcaggtaagatgcatatatgactatggtatatgaaacctttccaaacagaaattcccactaggcattattcaaatctaagcaggtttataatccagaatcagaaaaactgcatcacacttctacagaatctgactagcctaagaactgctgttatttctttggggcaaaaagaataagtggacagattcttttggagcaaagggcatttcagaagaactctgttggaaaaccctaaaacaaaaacaacaacaaaaaaaacttagccaaaacggcattgcactggactcagaagaagaccatagcattcaaattcaaggttgtatttcattgttcacattggtcctttcccttcccaagaacagtttccctttcacccacattctttccagataccttaaggatctaaccatcatctgacacttcgtagtcaggttcctccatgagcagtcttctgctcagctcctggaccaggccctgcaaattcagttcaagtaagaccaggaagtaagatgttgatccaaagtggaatttccagccccagctcatgcatgataggagggcacttcctcatgcaaatgcacctagtgcagctagagcagattttcagcttctttggagctgtgtctctctctataatttattgaaattcatatactgtttatagccctttcttctctttcccttgtccctgctgcctcctgggctctccttaaagaaacattttaccctatctctactaaaaatacaaaaaaattagctaggcgtggtggtgggcgactgtagtcacaggagaatggcgtgaacccaggaggcggggcttgcagtgagctgagatcacgccactgcactccagcctgggcgatagagcaagacttcgtctcaaaaaaaaaaaaaaaaaggaagcattttaggagacaggtttcttttgaaagaattattattattaataattttattatttataaattttataatgcctcttctgaaaatttggtacagtgtcatggtatgaatgcttatatgaccagagatgtgagtcacaaccctggggtggattccaagtacatatctgacaggcaaaatggcatggtgagcatagccttggaaatcagacttgaactttatcacttaatagatgtgtgatcctaagcaaatcccttaaatatatcaccacgttagagaggcccttcttgaacatcctttatctaaatgataaatcttatcatcgtttttccatttgaatttttcataacattatcatattctgtaattgaatatttatgttttttattgtgtcttccccgatggactgtaaattccataagggcagagtttgctttgttcatcactgaatacccattgcctagtgctctgtgcctgccacagagtagacttaaataattgtggaataaataagctcagttttctcaaaactcagaaaacaagaatatctcttctagaacagggataaatactactgacatcagaaatgtaatgtgaaataacgtacgtactaacatttgtttttactaaccaggcacatggtagtgctcaagaaatgttagccatcttttcagttatttgtggttttaacagcaagtcatggcctttgtaactctacttttctaattataaagtgagaggaaaaattactaccgcttttctactgccaaagcacactgttgagattacagaaaatatacaaaaggcattaggagtgactcagcagacaggatccactgagattaagaatttgttaaatttacaactctcatgacatttgtcttaaccggggtcatccattgctctctacaaggttaacacttcttgcctaatagctttgaaattacagcttcaccaggactttacattcagcactaagaaaatagacatcttaggctgggcgtggtggctcatgcctataatctcagcactttgggaggccgaggagggcggatcacttgaggtcaggagttcaagaccagcctggccaacatagtgaaacccattctctactaaaaatacaaaaattagccaggtgtggtggcaagcacctgtagtcccagctacttgggaggctgaggcaggagaatcacttgaacctgggaggcagaggttgcagtgagccaagatcatgccactgcactccagcctaggtgacgcaacagagtgagactctgtctcaaaaaaaaaaaaaaagtaagaaaatagacatcttagatagcaaactagggttgagaaagattgtgcttgagtacaatagtggcagcactctagaaattcacggaaagaaaggaaaaaattaatctggctataaaacaccccagtaatatccaatttccagtgatagataccatcttactggtggcagcagtgggctatccattgtagctgccagctgtagtggggaggcatgggtggtggcagcaggagcagctatgggagcagcagtggtggcggtgggacccctgtggcccatgtccccgaggcagccaactgcaccacccccaccctcgcacggctggtcaggacccactctcccaggcccagagcctctgctgtggcctcaatcttgctccctgccacatcccaggagcctgtgagaacccagccaaagacacagccaagacttgcagggctggtcccaggagcatcaggtttgtttgcacagggttggctggggccactgtgccacctgcatcttgcccgctgccactgtgagggaaacgcaaagaggaggcatggccagggctgcgcactccatggagctggggggagctggggaaaagcagaagccctgccccttgcaagctggcagggtgggagctccccaggcacaactgcagctgcacaagctctggctgcaacctgggcacccctgtgctcttgggagcctggagcaggcgggagccctgccctcccaggcatagctgcagctgcccaaacctcggctgcagacccaggcatctctatacttttgagggcccaggaaggtccctccttccccagcaggcttggaagtgcctactctcactgtctggcttctcctggctgttggtgcccactctgatcatggagcaaagctgaagctgagcctgggcactggtgcaacccagccacgtgtatgcatgctcaaggcagcactgacatgccagccccctggcaccctggtcccctccacacactgggtttggtcactgacaagcatgagatggaggctgagggggcaggccaagggcagcttggtgttggcctgcaggtgccccttggcatgaacagcctgggcaccatgaatggaagcaggaagcaggcagactcctaggcagacaatggtcagtccctggtgaagtcccacctgcaagccacgaaggacctgaagcatggaggccaggctgctggtcccgcagactgcagtgggaatttgtagtgctttttctgggctgcccacgtccactcatgaaccaactggcatgcacttccttccctctgaggcccatgaaaagccccggactcagccagaccagaagagaggacgggatgatctgcctgtagagaggagttaccctctctgttggagctgaacactcatcgggatgacctgcctagcagagaggggccaccctctctgctgagagctgaacaacaccctggctatggagaggagctacccactgtgggtctcctctgagctgttctatcgctcaataaagcatctcttcaccttgcacaccctccacttgtctgcatacctcactcttcctggacacaggacaagaattcgggacctgccgaatggcggggctaaaagagctgtaacacaaacagggctgaaacgtgccctttgctcaccatgttgcaggcgacaatagggaaagaagacaataaggagagaagagctgtggccctttggggaacccagacctaggagctcaatgagccagggttgtgacaccctctttagggatctgtggttcctggcatctctaagcttccaggagccatcacgttccccagtgtcagccgtggaagctggctgcttatggtatgccaggcttccatcaccatggcaacaggggctgatgtcataccaagccaaaagatcaggctctgcctctcccattgcagccagtgtgcctggctgtgcacagtggctggacccttgcttacacacccctcgccaccccatgcctggctcgcccttggcaggtatgggatccaggccggtaatgtgtaacctgccaggccgagtgggtggaatgagcccagcaggccagagcaaaagttgggcaaaggcgccattggccacagaggtttctggctggcaaagcaacaccccaaggatgctgtaacattacctcctgaaataggaaacttgattattaagctaactcttccttccctgtacttccaataacagtgtatctttacaatattccaaattcagtcttcagatgcccccaaatctgtaatcttataattccccactagtgaatttctgagaattgtgattttcaactctggcacacaatcacctatggacctttgtgaagaagaaatatgtcaggtctcatttaagacctactgaacaagaaacttcctaaagtgagacttaagtttctatatttttaaaataaactctatagattattcttgtataaaactagagttgagaatcactactgcatttgaccctgacctcctagcaccagaataacaacattacattcaagggcaaaggcaatccagcataagttaaagagcaccggctgggagtgtcaggcagacttagctgtcactaccagcatggtcacataccttaagcaagcctggttcctcacctttaaacagggactactaaaagtatttgcctcaaagacttggattcaacactaaactgtataaaaagcatttagtacaatgggtgtcacatggtaagtactcatagtaaggggtccttcccctcaccccaccctttccaaagggtaaatttttcccaagctataatcttaaaaatctgagaaaacctacaactcctcctgttttgcttgctctcccaaaccaaaataagaggaaaatatacctcagcaggacctgcctcagattatggaagcaagataactcaactagttggagcttttatttggttaattttgcaaatttggccgaggctccttgtttctgcctacaaattgtttcactgccactttctgcattctttgaaacatgccagatgtttcaaaaatacaactctggtaaaaagagggatcaggagcctagaccaatacaaatccagcacaggagagcatggtgtgtctgaagtatcattttagattcctttagccaaggcatcaactatgtgcaatttacaattaaatcactgtgctaagagctattgataatataaagatgtctaagagaatatttttggcctttcaatagccatttcatgtacttaaataatatattttagaagttgtcacaagttagccaagccacaagccaaattagggatggtgaagaaaatggaagatggtcaggatgcccactttttcttcttctttttctccagagctgaagtatgaacttcattatgtctgcagacaacagtggcactgccttgactctgttgaagagctggtgacatgagggaatcctgcatctgccctgctctctacttggcacagataatgcgccaggccctctaagcactttacataagttatctcatttaattctaacaactccatgggataggtactattattattcccattttatagataggggaaatgaggcttagagtgaagtcacagtcagtaagtggtgaagctgggctctgacccagattgtctgaaccttcaacttgagctctttaactactacatgatgctgagccctctctctgattctgaaagtctgagagagccctctaaaaagcatagcctgatagccacatcaaaatcacatggtcaagaagtcaggaaagtggttattcctggtgtatgatggctgggagggtgagtcagtagtgactgaaaggagcaaggagggattggcaaagggggaaatagtactgaggagttgtaatattccatttcctgatctaggtacaggttacttacttcatgattgacctgtgtttgtgaaaacatcagtttgtgaaaattcattgttatacataaaagcacaagataagtacacttttctgtatgtatattttacttcagtaaaagtataaaacacaaagtataaagtgatctttaattattttttctttactctagctccctagcaatgttgacacaggaagaataagtctttataccctttataccttatggaaaagacatggaaaactttacccttcactgacttaaatttatactagatttggattatctcatttcagtatcttgcttttaacagaagactagccaaggaatttcactgaatagaaagaatgtaagttaattgtgttgtacctgagtaatcaaatgcatacagccaactcttaaaaaattgtagtctatctcacattttatcctgctgctcaaggaatagatgttacaatgttacaaatgttgcagattagatttctaatatggaggtgcaaaaattagcatagctagagttaaaccagtgttctttttctgttttttcttttcttgagacagggtctcattctgtcacccaggctggagtgcagtggcatagtcctggctcactacagcctcaaccttctgggctcaagtgatcgtcccatctctgcttcccgagtagctgggactataggagtacaccacccccttggctaattttttttttttttttttttttgtagagacagagttttgctttgttgcccaggctggtcttgaattcctgagcttaagcgatcctcccgcctcagcctcccaaagtgctgggattacaggtgtgcaccactgtccccagcccaaaccagtgttcttaacccttgattcatattagaataatcctggaagcatttaaaaaaataccaatacctgggccctactcacagagatcctgatttaactggaggagaccctgttattaatttaaaagatcatcacagccaggcgcagtggctcatgcctataaccccagcactctgggaggccgaggcaggtgggtcacctgaggtcaggagttcaagaccagcctggctaacatgacgaaaccctgtctctactaaaaatacaaaaattagctgagtgtcatggcaggcacctataatcccagatacttgggaggctgaggcaggagcatctcttgaacctgggaggcgcaggttgcagtgagccgagatcacgccactgcactccagcctgggcgacagagtgagactcagtgtcaaaaaaaaaaaaaaaaaagatcatcaggtgattctaatgggcagccacaatgagaaccactgagttaaataaggctaatttcaaaaatagcctttgtacccaagattactacaaatcttatttctcctcaaatgtcactcaagagcgtaagatttttaaaagaaaattatttctcataataattattctgggataaaatcattgagctatgctttcttacatcttaacctggaacaaaataagtttaacatcacattcctattagtgtaaatttgcatcagaccccttccaaagtaaaaaataaggatattgttcatggtaaaactatgtttgccactagcaacactttttttatcttttttctgacgatgggccctaacaatctctctacaatgcagcagaggtgatgcagaaacaattcaagtaatcctaaactcctgtggggcagctgtttgctattggccaactggccatttgaaactcataataaaactcatcttcttagcaccaaatttccctttttcccccctttttctatttgtgtatgttggctactgaaaggtgttctgcaaatgagtctgaaaaaataaacagaaaatacacatggtacagatagcagaaacgaagagagtaaatacaaattatcaggaatgacaggacgtgcttgctgtaggcttaaacaccatccccaccttccagctaaccagtttgttgttgtatctggatgttcatccactactatcttgtttttgcttataatctctagagatttacaaaagtagatttaattactatagcaggctgggcgcggtggctcacacttgtaattccaacactttgggaggctgaggtgggcagatcacttaaggtcaggagttcgagaccagcctggccaatatggcgaaaccccatctccactacaaataaaaaataattgttaaaaataaaaaaaattagccaggcatgggtggtgcatgcctgtagtcccagctactcaagagactgaggcatgagaatcgcttgaatccaggaggtagaggctgcagtgaactgagatcgtgccactgcactccagcctgggtgacagagggagactcagtctcaagaaaaaaaaaaaaaaattactatagcagtttccccctcctaagtgtagttttcctttctgagctaaccattgttttcatcgttccaatacactacattccaaaacttaaaacatacaagaacaggatatctcagaagaaccctgagaattgaagtcctttctatcttcaatctataaggactggctactccacatcaggccttgaattagggtttaccctaatgttgataacttttaaaaattcttaaatccttcatcttgaacttactattaggctaaatcttctctctctctcaagccatttttccactccccaaatgactccatgttaaaaatcccatagaagctgattatcaacaaggatattgtattctgagacactgtccttccctagaagagaatgcagatctatagtctaaaaatgtaaaaatattctaaaccaaataattcttacattttagactttctttgcatctgccttttccacatttgattctagggggtggctttttcttttctttaataacacaaaaggctaacatctcttcctttcactgggctattcaaacataaaagcttttttctgattgcacagaatataatattatatccttcaagaatataacaaaccaagcaaaggaatgaaacagaccataaaaatagtatgactattctatatatgaccttctgcctgtttggttgggtaggggttggggtgagaagaccagggaaatgagataaataagttttatttttaggaaataaactaatataacaaatattttcctgaccaccaggctggggaagaaatagccctacaatggtaaatgaatccagttgttcctaggagaccacccataagcacaataattggaatcccagctcatccagagcttcttcctccttttaggtaggatagcagtgggtacaggagagggaaatgaagagaagcctcaggagtctcagtgcctgttgcagtcactagcatcccaacctgctctagtcactgcctacattccttcttatctgaagccaaggtgaaactcctgcagctaaagccagtatcttctttctctgtgacttcttccagtcacactgttacctttctctgggggcagacagatcctctccccattatggagacctctaacaaacctgtgcacagtagagggagcaagtagctgcttctatctattatctggtttcctggagactgagtgggatcagaaaaggggcaggggcctctctgcactcctgccttctcttccaggaaagccccaagagatctaaggcagccagccctccagccaaattggcctccagccaaatttatttccacttatccagatttcttctcttcttcccacatactgcatgtaatgattttctcctttccttttcagggctttccacgaatagccataaaactaatttgtgaagtgtagattatactttctctaagggcccctactcccctgggcccagtgatttgcacatgagtcaatcaatacttggtgaatgaatgaattatgcagaagcaaatgaatgaataaaactaaccaaagttcatacttctgttatcccaaaattgaagagaaagttcttcgacgattgactttatcttctactcttcttctttacatcagtatttctacttcaaatacttatcaagatcccataccacttcctttgcagaaaactaagtaatggagatttcaatcattttgctctgcaaataactgccccccaccccacccccaaggttaaggcttcaaattacaaagaagctcttcaattccatttgacatgggggtgggaacagggaagtgagaaaagggggaaaaaaaggtgtgggaaatactccctgaaaaaacaaaacaggaggaggatctaacacctttaaaaagccagccaagtacatgaaacaacttttgcctcttgaggaaaagacgacaacaaatctgacttaaatgaatgaaaggcttggcaataaaataaagcaacccagagtaatctataaatacatatacccaactaattgtttctctttattttttttggagacagagtctgactctgctgtccaggctggagtgcaatggcatatccttccgccttagcctcccaagtagctaggactacaagtatgtgccaccatgcccggctaattgttttattttctgtagagacagggtctcgctgtatttcccaggctgctcttgaactcctgggctcaagtgatccttttgccttggcctccgaaagtgttgggattacaggcatgacccaccgtgcctggccccaactaattgtttctaagggagaaaaaccattaaaactaaagttaccttttccccacgcgtccaacttcatgaaaatattcttcatgtagattcccatgcactagtctctttgagacaaaatcagtcgaaataatatgccagtataataagtccagaggactccactgcaaactgaacaattttttttttttttttgagatggagtcttgctctgttgcccaggctggagtgcagtggtgcaatcttggctcactgcaacctccaccttctgggttcaagcaattctcctgccttggcctcccaagtagctgggactacaggcatgcaccaccacgccagacttttgtatttttagtagagacggggtttcaccatgttggccaggctttctcaaacacttgacctcaagtgatctgcacacctcagcctcccaaagagctgggattacaggcatgagccactgtgcccagtctgaacaaaataaatcttataggataccatataaggagactggtacatattccatcaatgaggttgcccactggtgatgagctcatgatggctatcagctgagatttcatgtcagcactgctcctgcttatcacacaacactggacaaagattataacctttcaccctcagtttgtcatctgcaaaatactgataataagtgttcacatggatttatcagttaacgtttgcaagcactaggaaaatgagcaccactccagctattaatgaatcacaataacttaactcatgccattccagattcatcaacactgaatgaaatgcagttgtgtaaataaatacgtgaatgaggtcctgaaatggtaactgcattcactgtgacatgaagatgaggaagccagcctaagtgcaggtagtaatatggtgatatacttgagacacatcttacttcaagagatagtttacattagtgaaacttcaacaatatgtatggagtgctactatgagcaataaatatcctgatacagacaattcattttttatggtcaaggtttgtagaacctagttttggtgacagctacctgttggaagagatcaagtcaagtaaaattatagaaaacaatcaaatctgtaaaaaacaatacagttttgaaatgtgttatgattcggtttatataaactctactttttaaaatttgtgaagtaggattcattctataccaagacacagaaaaaaaatgtccaagtgggaaaaaggtttgctatgtttctaaacttcagtttgatacaaggccatcttgaacctctcataaaataggggggaaaaattccaagagcggcccagtctcctatgggtataacagtccaaaaatatgcttgaataaagtctttcctcacagtgccatccctaatctgcacaagcttcacagtaaagggcagtacaccttaaaaaaaatcaggttgtcaccaagtcttcaacttagagccagtgagaagcaaatagataaaaatgtcaggcatctgggctgaaaggtgaagcagagggcagagaccagggcctctcacaaagagctggtcctctctatttctaattttcattaatacaactgggacggtgtctgcatttttgtagccgaccccctcaggtttttttgagggagggtggtgctcaataggagacagttatctaaatgacagttggagagctcattagttttcctgacccacaactcttcccttcacttccctccagaatacttccaacacccctttaaggtagaacaatgtgtatgaactaataaggcaagagtccagcaggacttgttttctggtcacaacactgctgaacaaagtaggatctgttccagatgggataaagcaaagaaactggccaaaaccagcagactgtgacaagggcaatccctggctgccctcattgctcattagcatggacactcccaccagcatcatgacagtttacaaatgccatggcaatgacccagaagttactgcccctttcctagaaagttctaaataacccacccctcaatttgcattaacctgccccttaatttacatgtaattgaaagtgggtataagcgagtatatatacagttgccaagagcccacacgttgcagactctgggtacactatctatgagttagtgctgttccacaaggagcagtactgttcaataaaagattgctgtctaacaccacaggtttgcccttgatttctttcctggtgaaactaagaaccctcctgggctaagccccagtttgggggattatctgtcctgcatcactactaggccattcaatactcagggggaagttcacttatatctcaggatatactgagaatttccactgctcattgcaacacacaaaaataagtcaatttaagttgttctctaacttcagcctgactcttgtgggtaagtaagcaggaggtcagatgggataagtaaaatttataacatcccatgaaatgtagttagataaagttctacatttaagatgatcaggtcgggtttccagtccagtgattataacactatttggcttaacattatcaatagctaagacatgtgaggcccatgtacgtgaggaataaaggccctgtggcagcaccaataccaagcagttgccacagggaaaagaataatactattgaccattaaaaaaatgtgtgcatgaggggaaaaaaatcccacaaaaagagtcacactctttattgaaggagactcactcaaggttccaagatgccacattttttctactttgataaataacttttgagtggtcattgccatggcattatgcatataaatgtaccatactgtttatatatacactcattctaagccacctatttgccttcccagacatttggctgaatggggtcaaatagataaaataataggcactatatcagttgcatttaatagccaaatttacccaataagattttacttgaatcaccaaagtctgtataaaaacatatacctacgtacattggaatcagtaaagatttctgattcttcacattcacagcaaagtaatgctgctgattcactgtcttccaaatgagagctctgtaatacaaacaagatcatttcagagatccaaacgaatgggcccataagcacgaggggaaaagcaagctgaaatcactgagtcagtggtgttagctcacaggtgagaagctgcaattctgattagtgatggctattttgagagaacactgccaacaaggtgactggttagttgattgaggaatgcttgatcaactgaagcatttcctatggtttcccgatttggggaaagagccagcacatctttttctgtaaagatggtgctgctagccgggcacagtggctcacgcctgtaatcccagcactttgggaggcggaggcaggaggatcacaaggtcaggagatcgagactatcccagctaacacagtgaaacctggtctctactaaaaatagaaaaaattagccgggtgtggtggccggtgcctgtagtcccagctactcgggaggctgaggcaggagaatggcgtgaacccggaaggctgagcttgcagtgagccgagatcgcgccactgtactccagcctgggcgacagagcgagactccgtctcaaaaaaaaaaaaaaaaaaaaaagatggtgctgctaatcctttgtagtatgtactctgaactcttctcagactggggatagatttgtgttcatttatcttcacatccaaagatacacatttgatgtatttgtttagagataggctatagaatatagcatagggcctgattacgggatctaactcttagcctagcctcattagctctctgctgccaagtgttcatatgagccaagagacaggccaggcacagtggctcatgcctgctaatcctagcactttgggaggctgaggcaggcagatcacctgaggttaggagtttgagaccagcctggccaacatagtaaaaccctgtctgtactacaaaaaaaaaaaaaaaagtatatatatatatatatatatatattagccgggcatggcagtgtgtgcctgtaatcccagctactagggaggctgaggcaggagaatcgcatgaacccagggggcggaggtttcagtgagctgagatcacgccattgcactccagcctgggtgacagtgcaagactccatctcaaaaaaaaaaaaaaaaaaaaagagccaggagacatgccctacccaagtcccccaacaggcaccagaaaacaatttaaaaccttttcttctgttctctaatctctttctaaaaatctgtctagaagacagacaaggaaaataagacaaaggagtgaaataattagctggtaacataggagtatttttccctatgactaacaactcaaaaaagggaacagaaaaggctccaactctgactcattagattctattcaaatgtttgctgtttagctaacagcagctggaaactgagttatccctacatggatcattgatgcataagcttacgtcattaaaacttctcactaccagtggctgaaacttataactacttcatggctatcctagttgattcctactttaatttttcacaggtagggctgtgtttcatctaaagtataccctcagagataagagttttagagtgcaaataaacttaaagaaagtaaagctcagagttactctttctgataacagccttgctcctggtttacttccttctcattttttttctactctgaccctttgtctacttttagttttctgtcttaaaaccaagtctcatctggcattgtccctctctcttcctcttttagaaaataatcagaaataaccaaatatttaaaatcattgttgcccgagcgtggtggctcacgcctataatcccagcactttgggaggccgaggcgggtggatcacgaggtcaggagatcaagaccatcctgactaacatggtgaaaccccgtctctactaaaaatgcaaaaaattagccgggtgtggtggcgggcgcctgcagtcccacctactcgggaggttgaggcaggagaatggcgtgaacctgggaggtggaggttgcagtgagccgagatcgcgccactgcactccagcctgggctacagagcgagactccatctcaaaaaagaaacaaacaaacaaaaattattgctaaaaatcctacaaatgtaaagtctttttaattcttgttctcttatattttggaggggggagaataagaacatttactctccatctagcttaaaaaatatataaaatatttgaagacttctggaactcgtattaggaaagctaaaggcttaataataaatatttgaaagaattaaaatggtagagatcagagctgttttcaatcttcccaagctctcatactacaacagataataatatagataatactaagcacatcaaaagtggcttgtcattgtcacagtataaaaactagagagaggctgggcacggtggctcacacctgtaatcccaacactttgggaggcgggtggatcacctgaggtcaggagttcaagaccggcctggccaatgtggtcaaatcccgtctctactaaaaatacaaaaaattagctgggcatggtggcgggcacctgtaatcccagctaccctggaggctgaggcaggagaatcgcttgaacccaggtggtggaggttacagtgagccaagatcatggccatagcactccagcctgggcaataagagcgaaacgccatctcaaaaaaaattaataataataataataatgataaaaactggagagagcttgagcccaggagttggaaacctgcctgggcaacatagtaagaccccatcttcatgacaaaaaaaaaataataataatcagccaagtatggtggcacacctctgtaggcctggctagttgggaggccgaggtgggaggataacttgagtttaggagttcgaggcttcaagtgagccataattgtgccactgccatctggcctgggcaacagagctagatcctgtgtccaaaaacaaaacaaaacagacctgaagagagaaaagtaaaaattaaaccaaattacactagttaagatgttgcagctttcattcttataaatatttcagatgtccacactagctctttcaaaatgacctttcggctgggcacggtggctcatgcctgtaatcccagcactttgggaggccaaggtgggtggaccacctgaggtcaggagttcgagaccagcctgcccaacatggtgaaaacccgtctctactaaaaatacaaaaattagccaggtgtggtggtgctcaatcgtaatcccagctactggggaggctgagacagaagaatcacttcaacccgggagatgaaggttgcagtgagccaagatcacgccaccagaatgggtgacagagtgacactctgtctcaaagaaaaaaaaaatgacctttcaagaaagaggtcctgtaaccacacttgcattcctaaagttattttaagactttatatatatattcatcaattgaaacaattcattaagatacaaggtatccattaaagtgggctgatggcattacaacataattggttcatggaacaattgtttacttgcaaccaacatatttagttctaaattaaattctgagaaacctaaaggaagacaaaggacaaaggtcaagttcatttccctgccttctgaaacctggtaatttttttttttttttgagacggagtcccgttctgtcatccaggctggagtacagtggcgcaatctttgctctctgcaacctccgcctcctgggttcaagcaattctcctgcctcagcctcccgagtagctgggactacaggcgcgtgccaccacgccggctaattttttgtatttttagtagagatggggtttcatggtgttagccaggatggtctctatctcctcacctcgtgatccacccacctcggcctcccaaagtgctgggattataggcgtgagccaccatgcccagccaagacctggtaattctaattcctgaattgtttccgggttctgcagagtgaacagtctttctcatgagtatatggcttattccaagattgcaaggacgaattaatatttaggacctctactaaactacacaattatttaaatagatgctaaaaagcgtttgacaaaatagtcatttctggtttcaaacatttttagtaagctaggaatacaaaatgcagccttaattcactgcagagatttttttttttttttttttccagagtctcactctctgttgcccaggcgggagtgcagtggcgcgatctctgctcactgcagcctatgcctcccgggttcaagtgattctcctgcctcagcctcccgagtagctgggactacaggtgcacaccacaacgaccggctaatttttttatttttagtagagacagggtttcaccatgttgacaaggatggtctccatctcctgaccttgtgatctgcccacctcggcctcccaaagtgctgggattacaggcatgagccaccgcgcgcggcctaggtgggcttaattatacatagcaactctcagtggtaggcctttacctcaaccttgttgcctgaatttcatattgtaaattccctcaatgtttcttctagcatgaaggtggtgatcttccccagtttgtagtgcagataccaattctcttttctttattttcttcttttgcatgtccctttggcaggaattttgaggagggcaaagtcaaactcatattcttgcattggatgtatcaagcccaaatcttaactaaactgagttcatatcctggttctgccacctactagcagtgtgattttgagcacattccttaatttctttgagctcagtttcctcatccataaaaatggacacaacaataacatcgatctattagggttgttggaaagactgtatgagagataacataagaaaagcatttagagacttagagccaggtgtggtaacatgtgcctgtagttctagatactcagccgctctagaggctgatgagggaggacttgagcctgggagttcaagtccagcctgcacaacatagcaagataggtgtctctaccaaaaaaaaaagtaattaaaaaaagcacttagaataacttagcttctgatgttgccactattactgctgcttctaataataataataaatattactgtaataatattaatctccttcctagatgtaaaaggcttatacatttgggttaaaattttctttcaaagaaacttttgtcttcaagggaaattttgcttatatcaagtcttaagtgcttttcattcttaaagacaaaatcatattccctacataacctggaagcaactgagctcacaatgagtcattcattgccatttattgtacccctactgcgtattaagcacttttctgggtgctgaattattagtagctaaggtaaaacaccaaacaaaaagggaaaggtaactgaacaggttacaaaaacagttttttgctttttatggggacgcaaaaactacaaagataagatatgacttggggaaacatgtccctttagctaagtattgtgtggagaaaaacaggggttaagattgttggtaagaaaaacatctgcaccataacaagaagtttcaatccagaacagcttctaaggaacaattatagtaataaaatgttgcaatttttatatggactgtatgatgcaagaactcatgtactaagaaggaggttttcaagagtgtaaaatctaacttgttcagttacccaacaatttacaagcagaagtcttaagaaataatcccacaagaggccgggcacggtggctcacacctgtaatcccagcactttgggaggccgaggcgggtggatcacctgaggtcaggagttcgagaccagcctggccaacatggcaaaaccccgtctctactaaaaatacaaaattagctgggtgtggtggcagatgcctgtaatcccagctactcgggaggctgaggcaggggaatcacttgaacccaggaggcagaggttgcagtgagccgagattgcgccactgcactccagcctgggagacagagcaagactccatctaaaaaacaaacaaacaaacaaacaacgaataaatcccacaagagtcaaaacctgttgccctgttgttactgttaagtctcttttaccctattcttgttatagattatatggttttaagaggcagagaacatttactatttctttcctctttccttttttcctccatctttcatcctctcctcttttttttttgtatctttttttgtggttctaagtgaatacattgcaggtgtacttaaaaaagctagtgactgaaaatgtactattagacataggctgggcgtggtggcccatgcctgtaatcccaacaatttgggaggctgaggcaggcagatcactgtagcccaggagtttcagaccagcctgggcaacattggcaaaactctgttctctactaaaaatacaaaaaattagctgggcgtggtagcatgcacctgtagtcccatctactcagggggctgaggtcggaggatcgcctgagctcaggaagttgaggctgcagtgagccgagatcacgccactgcactcccgcctgcacaataaagtgagatcctgcctcaaaaaataaaaagaaaaatatactatcagacatcaaacaataaaatatatttataccccaaagcccagcaactttgggagtaagcttttaatcctttaaaggccaagacataccctggcacttaggtgtaactgcattgacaaagcaatttcatagtctgtgtctgatccaactaaggaaattctctaaagtctttgctcaaattatacatttaaaaacaattatttcaattctttcctgtatctactgagagaatgaagaccattcttggcaatcagactattgacattccagaaaatgcagacatcactctgaaaggatgcacagttattttgaagagccccagaggaagttagggagggacttcaattacatcaatgtaggatgcattctccttggaaaagaagaggcgctaggttgacaaatgattgggaaatagaaaggaagtggctactgcttgcactatttgtaatcatgtacagaacattatcaagggtgttacactgggcttccattacaagatgaggtctgtgcatactcctttccccatcaacttagttatccaggagcatgggtctcttgataaaatccaaaatttcttgggtgaaaaatacatctggatggtttagataaggccgggtgttgcttattaagttatcttaagtccagaaaaatgtattaatccttgaaggaaatgacattgagtttgtttcaaattcaactgctttgatttagcaatccacaacagttaaaaacaaagataacagaaaactttcagatgatctgtatgtcactgaaaaaggaacagtttagcaggctgatgaataagatctaagagttgtccagctacagcaacaagatactgtatggttgataagacctgtttgtgatattttaatgatgcattaaaatacctctattacagctgggcttggtgatgcatgcctgtagtctcagctatgcaagaggctgaggcgagaggaccatttgagcccaggaggttgaggctgcagtgagccgtgatcccaccactgcactccagcttgggcaacagagtgagactctgtctcaaaaaacaaaaacaaacaaacaaaatccccaaaaacaattattttagtatgtaacacatatatgtggtaaacaactaagaaggtgtcaaagagtatttttaagtcttcctccatccccgtcctcccacctaccacaaccccattcctagaagtaatcactatgccagttcccaaggaatcctttcaggattattctgtgtacatacaagcattgtgtgtgtagatgttctttctccaaaatacacaaatgaaagcacactgcacctatttttctgcccttgccttttaaacttagtatctttgtttcactattttttaaaaactacataacataaaaaataacataacataaaatttacccatgattcaattacctcctaccgggtccctcccacaacatgtcggaattcaagatttgggtggggatgcagccaaaccatatcattccacccctggcccctcccaaatctcatgtcctcacatttcaaaaccaatcatgccttcccaagagtcccccaaagtcttaactcatttcagcattctactggtaccaatttactgtattagtctgttttcacgctgctgacaaagacatacccgaaactgggcaatttacatagaaagaggtttaattgggcttacagttccacatggctggggaagcctcacaatcatggcagaaggcaaggaagagcaagtcacatcttacatggatggcagcaggtaaagagagagcttgtgtggggaactcctttctttaaaaccatcagatctcaggagacttattcactatcatgagaacagcacgggaaagacttgcctcatgattcagttacctcccaccagagtttcccttctacaacacgtgggaattcaagatgagatttgggtggggacacagtcaaaccatatcaaccatcttaactgatttttttgagacagagtcttgctgtcacccaggctgaagtacagtggcatgatcatggctcactgaagcctggacctctcaggctcaagcgatcctcccatctcagcctccctagttgctgggactaaaaattaccacacccaggtaatttttaaaatttttctgtagagatggggtctcactatgtttcccagaaaggctgcaaactcctgggctcaaacaatcctcctgccttggcctcccaaagtgttggcataagccatcacacccggccccatcttaactattgttaactgtacagttcagtatattcacactgttgtatagtcaatctctaaagctttttcatctcaaaaaactgaatctatatccaccaaacaactcttcatttccccctattccaacccttagcaactaccactcactttgtttctatgagttttgacttgtctagataattcatgtaagtggaatcatacactgtttgtctttgactgagttatcttacttagcataaggtcctcaagatacatgcatgttgtagcatgtgtcagaatttccttcctaagtctgaataatattctattgcacacatatggcattttgtttatccattcatctgttaagacattcatttcattgtttctgattgctgcaaatatttcattgcagagatatcccatgattcagttaatcagcctcctactaatagattcaagttacttacaattaaactcattttctaatatgctataacaaattaccacaaactcgatggcttaaacaacatacatttattattttacagtctagaggcaaggagtcctaaaatcaaacaggtggcagacctgtgttccttctgcaggatctaggggaatgttacaggctaaattgtgtcccctaaaattcacatgtttaagtttcaatccccagtatctcagaatgtggttgtatttggaaacggagcctttaaagagtaatcaagttaaaatgaggtttagtaacctaggggtggttccaatatgggtaggccctaatccaatataggtgggccctaatccaatatgactcatattctcatgaaaagagattagggccacatgtagtggctcatgcctataatcccagcactttgagaggccaaggcaagagaatcacttgaggccaggagatcgagaccagcctgagcaacatagcaagatgccatctctacaaaaaaataaaaacaaaatagctgggcatgcctgtcgccctaactactcgggaggctgaggcagaaggattgcttgagcccagcagttcaagtttacagtgagctatgatcacaccactgcattttagcctagatggcagagcaagaccctgtctcaaaaaaaaataaataaataaaatagaaaaagagaagagattaggacacagatacacccagaggaaagaccatgtgaaaacagagggagaggacagccttctacaggccaagaaggtcagcctcagaagaaatcaacacattgccaacacattgatctttgactttcagcctccaaaactatgagaaaataaatatttgttatttaagtgatcagtctgtttaaatggcttatacttgttatggtagccctaactatttttaggagaatcaatttctttgccttttctagcatctagtggctatctgcattctttggctcatggctcccttcctctatcttcaatatcggtaaaggtgggttgagttctcttaacgcatcaatctgacctcctttcctgggttcctcttacacttttttttctttctctttttttaacttttaagttcctgggtatatatgcaggtttgttatatgaataaactcatgtcacaggggtttgctttatagattatttcatcatccaggtattaaacctaggactcattagttatttttcctgatcccctccttctttgcaccctccactctctggtaggccctggtgtctgtgttcccctctatgtgtccatgtgttctcatcatttagctcccacttataagaacatgcggtatttggttttctgttcccatgttagtttgctaagggtaacagcatccagctccatccatgttcctgcaaaggacataatcttgttcttttttatggctgcatagtatttcgtagtgtatatgtaccacattttctttatccagtctatcatcgatgggcatttaggctgattccatgtctttgctgttgtaaatagggctgcaatgaacatacacatgcatgtgtcattatgatggaatgatttatattcctttgggtatatatccagtaaggggattgttgggtcgaatggtagctctgtttttttgtttttgtttttttgagatggagtttcgctcttgttttccaggctggagtgcaatggcacgaccttggctcactgcaacctccacctcctgagttcaagcgattctcctgcctcaacctcctgagtagctgggattacaggtgcccaccaccaagcccagctaattttttgtatttttagtagagatagggtttcaccatgttgaccaggctggttttgaactcctgacctcaggtgatccaccagccttggcctctcaaagtgctgggattataggcgtgagtcagcatgccggcggtaattctgtttttagctctttgaggaattgccacactgctttccacaatggttgaactaatttacactcccactaacagtgtataagcattccattttctccacaatctcctcagcatttgttattttttgacttttaataatagccattctgactgctgtgagatggtatctcactatggttttgatttgcatttctctaatgatcagtgatgttgagctttttttcatatgattgttggcaacatgtacttcttcttttgaaaagcgtctcttcatggcctttgcccacttttttttttttttttttttgagacagagtctcactctatcacccaggatggagtacagtggtgcaatctcagctcattgcaacctctgcatcctgggttcaagcaattctcttgcttcagccaccgcgattacaggagggtcccaccatgcccagctaatttttgtatttttagtatggacaaggtttcgccatgttggccaggctagtcatgaactcctgacctcaagtgatccacctgcctcggcctcccaaagtgctgggattacaggcatgagctactgtgctcagtctcctttgcccactttttttcttttttttttttgagacagagtctcgctctgtcccccaggctagagtgcagtggcatgatctcagttcactgcaacatacacctcccaggttcaagcaattctcgtgcttcagcctcccaagtagctgggattacaagcgtgtgccatgacgcccggctaatttttgtatttttagtagagacaggtttcaccatgttggccaggccactcttgaactcctgacctcaagtgatcctcccatctcagcctcccaaagtactgggattacaggtgtgagccaccgtgtccagccctttggcccacttttaaatggagttttttgtttttttttcttgtatatctgtttaagttccttatagatgctggatatcagacctctgtcagatgcatagtttgtaaacattttctcccattctacaggttgtctgttcactctgttgatagtttcttttgctgtgcagaagctctttagtttaattagagtcaactagtcaacttttacttctttgcaattgcttttggcatctgtgtcataaaatctttgcctgttcctatgtccagaatggtactgcctaggttgtcttctagggtttttatagttttgggtgtccctcttctactttaacagcctttgtgactgattatgttgcatcctgccccgataatccagggtaatcttcctattttaaagttatatatgatcagcaaccttaatttctcgtttactatgttaagataacatatttacaggttcacagctgattagaatgaggactctactggaggccattattctgcccaccaccataatcttcttcttttttttttcttgagacggtcttgctgtgctgtccaggctagagtgcagtggtgcgatctcggctcactgcaaccttccactgccgggttcaagagattctcctgccttagcctcccaagtagctgggactacaggcacccgccaccatgctcggctttgtatttttagtagagatgaggtttcactatgttagccaggctggtcttgaactcctgacctcatgatccgcccacctgggcctcccaaagtgctacaggcatgagccactgtgcctggcccataatcttcgtctttgaaggctttactggggggaaacaattgttttctagaatccagtgtttacaccaataaactgggaagcaaaaaattaattaagtacaatgggaaatacaacactatagttatatactttgcacataaagaggatcgcaaaaacttaatatcagccacagaatgtttgaaatagctttttctggagaggtgatgatttggatttaatccactcatagtattttacataggcttttttcgtgataaatggtacagatttgcaaattgtctagtattagggatacaatctgtggttactgaatttaactgagtcaatttgaaaatttaaatcaggataaattgactggttccttcttccaggcatccacagttccttgtgcacacattttctaactcttaactcactactgtaattattgctatacaggttctttatccccctctggactatgagcttctcaacttgtactgccagggcctggcacacagtaaacattcaataaatgttcaatgaatcagtgacttagtattagttgttgcaattcttccttgttgctataaaaataacacaacttgaagataagttataatctttgtatgtaggtataattaagagaccaacagtcttcactcccctgaacacatgatatttgttccttaatagtaatagtagcaacagctcctactggaagagccgttacatgaaacactgcctcccttgggctccagatcaacatggaagctttaagccaaaagagcatcttcatttctcagagcctcttagcagcttggcctgtcagtggctaagagagtcaagatactcatgccacattactccctaactctggcctgcaattagcctatttcatttgcaaaggtattgctgctcttcactcattgcacgtaacacacaactgtgttatggtaagtatcataggcttgtttctcctctcactgtgccctttagaaggaacacatctctcagtccaaatctcacccatccttcaaagcaccagtcaaatcccagaatttcaggaggcttcaaaatgattacttcagccccactgaagtaggagatcccttctgaaccttccttatgtaggcaggggttggcaaactatagcctgtgggccaaatgtggcccatggtctgtttttatacagccagcaagctaagaatggcttttgcattttaaaaaggattgttttttttttaaaaaaaaggacaaagaatgtgcaacagagaccatatgtggcttttggcatctttaggggaggcctgaaatatttactaactggtccttaacaacaacaacaaaaaaagattgccaactcctggcctagagcacacaattcagcctaatgataaattgcccagaactgttctctaatctgtgcagtcttgtctccctgtggcttctgtttctgttgtctacccaacagtcatctctaacctcttttacctaccagtccagtactcaggctaacaatgccaagtacctgccttttcagcttagcctccctgaagcccagaacagtcatacatcttaatactggtcttcaaggcttgaggacaagtctgctgtggcttgtgggaaaagttttccaccatgacaaaggagatttgagaaaacaaactgccctttctatgcctttggatgcagttatgcagatttgatatctagagctgtgacagccattttgtgacctcaaaaagagaggcccaaggacaaaaggaagcaagttaaagatggtagagcagacagacagaactcagaaccttgacaactgcattaatcactgtatcaagtctataattgccttgctcctggccttctcatcttaaacattatctcacttttaatatggtattctggtacttcaaaagaaagaatcctaaatctataagtagattttgtgtgcttggagagtaagtcccacatcttctatgtctgcacttctacagatgcacaggggtgtaattgttgggatccaattattttacgagtaattactttggataaaatttatcacccttaaactttgaaaagattcctgagtgtacaaaagcaactgaggatgccagcttctatgaaagtaactttgatggacagctaccataggtaaagcatttcagatttcttatctcattcaatactaggctgggcgcggtggctcacgcctgtacccctgcactttgggaggccgaggtgggtggatcacctgaggtcaggagtttaagaccagcctggccaccatgatgaaaccccatctctattaaaaatacaaaaaattagctgggcgtgatggcaggcgcctgtaatctcagctactcaggaggctgaggtaggagaattgcttgaacccaggaggcagaggttgcagtgagccaagattgcgccattgcactccagcctgggcaacaacagcaaaactccatctaaataaataaataaataaataaataaataaatagatagatagattaaaaaaatactaaaagaacccagtaaggttacacactccaaattcatataaatgaagtctaagtggtagagtagagattttaattcaggtctcttatagatatactcatactttttcacaatatctctccttgtctttctaagtcttctattgcaactaacggtgataagatttaaagattttgcttatcattctttgaatgttcacttgatcacatctcagatcccatacaaatgccacattacttgtagttgcaaattcacaccctcacacagagataatctgaatacttactaaaaaaaaaaaaaaagaaacaacgctgtcatctccttgaggtagttttgtttgttttttgtttttgaattttttcccttctctttttctaatataatcagcttccctaaaagggcatgtttctgaaatgagagaaaaaaatcctctaagcagtgattctcagtgtggtctccagaccagcagaatcacctgacaacttgctagaaatgcaaattcttgggccccacccctgatctaccaaataaaaatctagtgtagtgcccagaaatgtgtttttcacaagccctccaggtaattcagatataaattaaagtttcagagccactggtccaaagtatttgcttctgtatatagcacttaaatcactgcattaaaactagaatggtggaatcatatcactcctatgaaaacagttaagcagtgggtttccaaattccaatgacttctccaggcactgaagaaacagtttctctacaaccaaattgaaataagagataaatgtcttctctattatacatatttgactcagatacaaaaacagacttaatattctaaaatggtaagtctacaattaaaagaagtgtaaagtaatttctgcaacttaagattgatacagcacaacaattaaatcactgcagctgtgtggagagataacatttattttaacatcagagcttggagggaagaaagagaatcagcagtttaaactcaatttggaaattagagatccccagcaggaaagctttacaacccagtttcctatccagtctataaaataaagagggaggacttgggattcaacctcttcctggcagataatttgctgagagtaaaaatgcactgtatcatttgtcagggctctaaggaacttctaaccctagtttaaggaagaatcatggataccaagaataaatcacaaatactctaaaaaatcattccttgaaggggaagaagactttgctgaccttaattcctatcacagatttcactgaacccaaatggggtttggtttcattaatttaacctataaaagacagaaatagttgaagctgcagagaaaatagcaatggaacctgaaacaaagtctaattgtgattaattaaaaattagtgtcttctaaagactaccagaagatgaagaacaataaatttacaaatatcagaaatgagggagcaggctgggcatggaggctcacgcctgttatctcagcactttgggaggctgaggcgggcggattacctgaggtcaggagttcgagaccagcctggtcaacatggtgaaaccctgtctccactaaaaatacaaaaaattagccaggcatggtggtgggtgccttgcagtcccagctactcaggaggctgaggcaggagaatcgcttgaacccaggaggcggaggcttcagtaagcctagatcgtgccactgtattccagcctgggtggcagagtgaaactccatctcaaaaaaaaaaaaaaaagaaagaaaagaaataagggagcaaaggagactatatgctggaagaatttgaaaccagtttagaaaaatcaattaactgaaaacaagcagtacaaagatcatttagaaatttatgtgtagatattgaattatgttttctcacagaaacattcctaactaatgcttggattcctaaactagcaactgatagcaaaactaccaaaagcaaagtggggttatctccagtgagatgcaaaagcagtcattcatatgtacaagttattcggtttacatagagggctgctacttgtatttgatcaacacctatatagtgcaaaatgcacaccaagttaggtactatgacagattctgagaagtaatcatccacaaaaaacaacaagttaataaacaagtttatacagacagggaaaagccaaggagccagaggtagatgttcactcctgtctgaaaacccatgaaaagaacaatgagaaaaaaatggcaacagcatctcagaacttctagacctagaatatcagggcacaaaagagaagctcttggagttatgtgtctagttgctaattaaatggctgaggagaactgaaatggaaattcatagagaggctggtttctctctccttaggcaaaccaaatattctattattttccattttgggttaggcttctgctattaagttagctgctgatttccctcctgttctgtgtagttttatttattttatttttatttttagagacaaggtctcgctctgttgcccaggctggagtgcagtagtgccatatcggctcacttcaaactccatcaccagggctcacacgatccttccatctcagtctcctgagtagctgaaactacaggccatgtgccaccacgcccagctaattttttgatttttttttttttggtagaaatggggtctccctgttgcccaggctgatttcaaactcctcggctcaagtgatcttcctgctccctcccaaagtgctgggattacaggcataagccaacatatccagccctgtgtaggagtttttaaaagatcagtcctgttaacttcatgaggtaacagcaggctggcaaaacaaggagatactgcaaggttaactctgtgtgtgctgaaagcatgcaattcttttgacctccattcacttgtaaatcaccttacatattagttttacagtctttaaaactgtagcattctagttatttatttctctcctcagaccaatatatgagagctatctgtggtttaaatacaaccatcaacttcccccagcccctgccacaaaaacacttaacaaaaaaaatctgtgtagcttgatttgggacctggactatgaaagtaaattaggttttagagatgctaacgtgtgtatcaggtagtatgatcactgtatgtgtgcaaagaggtggagttctgttatttccttacagaatgaaggtttgaacagcaaaaggcagatattttagagaaactaagcaacttcagaaaggcatctgaagaaaagaagacactgagtaagaaaggagggaaaagcatcccttgaacatttgtctggggatgtatgccaggaaagaaagacaagtgcagaaagatcgctgttacttagaatgctgagactacaaagttaggtgtcagatgattgtgaaaagagcctatttcctcgcaagtaaagagctctattccttctttaataaataagagaactgaaagatttagctctagtattagaagaggaacctagattgatatcaaggaaggctagagatacctaaaattaagaactaccaggctgaactgggggtaaagtgagtgatggtcttatatttgcaattaatttcctatatagcattctgaccacaagatgtcctcacactgtaacaaggtcattttgtattctaattgattaagtgcactatgatgagagaagctgcctagaaggagctaagtgaaagcttgtaaacctcaggtataatctttcaaagagattcattccctattctttggagaaacagttataccaatgattaaaactctctgagaagaatatcacctgaataactctctagggctcttcttccctgatctaaacccttgacatgtactaaaaactcagttaattttgggtacagcagaggtagtacctacccctcaagatccttgaatccataaaattgttaaagatgagagaagcccaattacacattttgtcctagtctgcctttcttctcggtcacccacagttcagtagccaacaccatagggaggttgccaagcgccttgggggaaccctcatggaggcagaagacaaggtgctcacataaaattcagttcccggctgggtgcggtgtctcatgcctgtaatcctagcagtttgggaggccgaggcgggcagattgcctgaactcaggagttcgagatgagcctgggcaacaaggtgaaaccccatctctactaaaatacaaaaaattagctgggcgtggcagcttgtgcctgtagtcccagccacttgggaggctgaggcaggagaattgcttgaacccaggaggcagaggttgcagtgagctgagatcgtgccactgcactccaggctggtcgacagagcaagactccacctcaaaaaaaaaaaaaaaaactcagttcccaccaggaaattcttggaagaagccctgtcgaatattggtcatgggcctgcagaatcctccccgttcccttggatggggagaaaaattggcagacttttcagtccctctcatccagcatcatggaaaataacctagaaaagtgggactttatagaatgctaatagaggtagctcagagctgattacaggttgagcaatgtcaggaaataagtaaagggataagagtagaagtgtttcaaaagattctagccataaaatagcaatgccccagagccagagaacagaggagtgagagtgtctaaaaagagatgtttctcaaagaaatgaacatttctctaaactagtttccatcttaggaaaaggattttggagatgaattcagaaattgcttcaacggacagagattctagagagatggtcaatacaaggggtcttacctactaaaccataattgggaggtgtcatgagaaccactggggtgagaaactcccaaaagctaaaggaggatcttagtaatctagggacttcagtaatcaaggaatgcctcctacaatcaagagtgttggttgcccgaaatccaagccaaccataacttaaagagcagcttgctggtgagcggaagctcaactttgaggtagggcttcagagatagccacaaggctgtccccttgtagtgtcccttgcctaggatgctttgtgtctttatggaggccaaagagaaacaccttgggtctctaagctttaggccaaagggaagattcaggacaagaatttagccctaactaacaaaagcaagagactagagacccaaaataggagagcatcaaggaagaaatgaaagatcggggaactgccaagtcatagggaagaattaccctgcccagggcaagagattagcagagacccttgtgaataagaccccctgattattgccaaagaaaagagttcctctgaaaagaaaattgcaggaaagaataagctgcttttgacaacggctttttctcataaaccatatgaagtgcaggaaggtcgcctgcagaaatcagtctgtgttgatctctgcacagagtgcaggcccagttgaaatcagaactctcctcataggcagtaggaatagatactaaatcataggtgtttatgatagtcattggcctgatcctagaaaaaaacctggagtttaggcatggacttcttgcatgggatattggtcggtactattttttttttcaggtttggttttaggataggaccttgggtcccatcctagctttatgtctattaaaaataaaactattccctttgggcccgcaattctatttctaggaattgattataattatgttaaatgacattttcccaatgttactcattgcagcatttattataataacgatatcctggagactggttaaatacattatggtgtatctatataatggaatattatctgaaataaataaaaacaaggaagtttttgatgtactaatatggaaatatttctaaagcagaataggtaaaaaaaaaaaaagcaaaatatgcaatattgtatatagtatgtcaccattagtgtaaaagagaagaatgtgtgtgtgtatgcttgcatgtctatgcatgcaaagagacaaagaaaactattaatattgtttgtgaagaggagaactggatggccagggtacgaaagtagaggatgacttcattatataccctttatgaggttttgacttttgaactttgtaaatgtcttacctagtttaaaaaattaaacaaaaataaattttaaaatcgaataataacaaaagaacgtctttagccttttagcagtaagcaagtcccaggaaaaaccagatttgattaaactctgacatgtgagtgaggatactgacaagtgtcacacaggcatctactggggtctgtgtgaacttgtttggagatctggaatactgataccataaatctaaaatctgtacatgaaatcattcagacactgatttagcaaatttctactgaactaccatgccttcattgtctatttgataaaaataagagttttctcttagagtttttctcttcataatctgtaatttctacctcaatacaaaacaaacaggctttcttttagatggatatgatacaattgaagtctgcacaccccaaaggtcagaatggaatctttcatgagtaaactctaattgcagacaaagactcttctatatatgacaacatcatacagggccaactgaagcagtactaagactttttgaagttgttatattcccttaagcatttctaaaacttttcacatgagaaagtaaggaagcaaaatatggtatttttggaatgaaactctggctaacagggttatggggcatctgagaagtcacgggataggtctaactttctcagaggggaggctgcaattgtttttttttttctctttatttccaacatctgctcttaaaattagttctgcacaaatgtttgcagatacagagcagctggcagtcttgcctgcattttgcccattggtggattgtaaggaagtcactgaagtagggctattgaattttccatttctgttccagtgttttcagagaactggcaaatttatgttctggaacattggactcagaatgttaacatcctactgaatactgtttagagcttgagatattcatagcagaattgtaagtttacatctaatctctcaagacaacaagatttgaaaatatactctcttgcagccatttgtaggcaattctttttcatgtcagtgtggaataaagatacactgttctatttatattagtgctttctgattcatttgattttttaaaataaataagaaaataaatcataaaaataaacatgccctacttaattaataaaaaatgcaaaataaaacaagctccactttcatctttcagactggcaaagataagagattataaatgtttccaaacctgggaaaagtgaaagaggaactctcacatactaatggctgggagtgtaaaatagtaaaatttttctgaaagtaatatgacattgtgtcaaaaatcttaaagatgttcatgacctattagtcgattacagaatttaaagaaatagagaggtgtataaatatttatacaaaaatattccctattttttcttatattacatatatcagctcaaatgttcaacaacagatgaataattacattgtagaacactgaaatgagttactgtccttaatacaacatagggaactcttatttcagccaaatcctttaataagcctgattgattttgttaaatggaaaaacactggtggaaagcagttgtctattagacattatgattgctctttgttttcaaagttattaaagggttaaattgtttcttttgtattatgcacatgtttgtttttaaactaactccagctctaattcttgaaaatggagagtttacagctttcaatttgttttacaatcccatggaattggtgactattattaatattactcagtggccataacagcacagtataacatcaacatgaactcttggctcccattcaagaatcaaaatagtaatattaaaaagagtgtatatccctattcctagagactacattaacaaagaaagaaatctccctccctcccaaaagagaataatgatatttacaaaaggttaagtgggtacaggaacaataactaaagaaggcagagaagtcctggcatggtggcttacgcctataatcccagcactttgggaggctaaggcgggaagacagcttcaggccaggagttttagacctgccttagcaacacagcaagacccccatctctacaaaaataaaaaataaaaataaaaaaaaggcagaggagctagcggtctcgtaacaaggtgctatggagtacaagaggagggcttataggtggatattcctggtagtgtaaaaagtattctgggggccgggtggggtggctcacgcctgtaattccagcactttgggaggcgaggcaggtggatagcttgagtccaagagttcgagaccagcctggacagcatggtgaaaccccatctctactaaaaacacaaacattagctgggcgtggtgccgcgtgcctataatcccagctactcaggaggctgaggcataagaatcacttgaaccggggaggcaaagactgcagtgagccgagatcacaccactgcactccagcctgggcaacagagtgaaacttggtctcaaaaaaaaaaaaagtattttttggtacagtaaggtgaaagtaatagaactctgaagtgcttcatgttagaaagaataatttttaaaattaactttggtgagttttagagctacggagttaacaaggcaagcaagccaacctgcaagcaaaacaaaatatccacagttacttacgggttacctaaaaagccaagagaaatggaattgggtaggattggttttaatatgacttttaaaacaaaaaatctttaagatgtacatctagctcaaaaatctccaaagaggccgggcgcagtggctcacacctgtaatcccagcactttgggaggctgaggcagtagatcacctgaggtcaggagttcgagaccagtctagccaacatggcgaaaccccatctctactaaaaatacaaaaactagccgggcatggtggtgcacgcctgtaatcccagctgctcgggaggctgaggcgggagaatcacttgaacccgggaggtggaggctgcaatgacctgagctcgccctgctgcactccagcttgggagacagagccagactatgtttaaaaaaaaaaaaaattccaaagaaacacatggaacaaacatatggagacaagaaatataaaaaacaaagccataaatccagaagaaaggttgagctgtagcattatcacctaccaaggcaaacatcaatcaacttttactattgatataggacatagggcctgaatagagcaaatttaaattggaaatccccatccaagggaaagtttccttccattttccattctgtttttagaagaggttatagacaagaacagaaattgctatcagtgactgactgacttacttaaacaagcttctagggaaagttcttggcaaattagatatttggttgagtttcctccaccttctacatttattttcccttgagagggaagtgttcaaaataatgtttggtttccagaaaagtttattaataggctaaagaaagatattttattaaagggggttttcaggctgggcgcagcagctcatgcctgtaatcccagcacttcgggaggctgaggtgggtggatcggataagctcaggagtttgagactagcctgggcaacatggcaaaaccccatctctacagaaaatacaaaaattagctgagtatggtggtgcgtgcctgcagtcccagctactcaggaggccaaggtgggaggatcgcttgagcctgggaggtggaggttgcagtaagccaattgtgccactgcactccagcctgggtgacagagcaacactctgtctcaaaaaaatggggagggggtgggtgggtttcaggttaacacatttaacttacaaaataaatttggttttataaataaatattttgatatggttaggctttgatatgggtccccacccagatctcatcttgaattgtactccctataaccccgataagggagagaccaggtggacttaattgaatcatgggggcagtttcctgcatgctgttctcatgatagtgagtgagttctcatgagatctgatggttttatagggggctcttccccattttgcttggtacttctccttcctgtcatcttgtaaagaaggtgccttgcttcccctttgccttccaccatgattgtaaatttcctgaggcctccccagccatgctgaattgtgagttgattaaacctctttataaattacctagtcttgggtatgaccttatagcagcatgagaacagactaatactttaattatttacaaataaataattaaattgcctttatgagctgtgaaaagaacatggagatgcagaattctctgtgattgtcagataacatctaaatcagtcagaaaattaagttaattataatgctgcagattttcaaaagattgggctggtcctgagctctcttttctctctctataactttcccccaagtgatcccattagtaccaggactttaaatatcaactatttgccggtgaatcccaaatgtacagatgctcctcaacttacaaggctcagttctgataaagtcaaaaaaatcataaagtcataaaatcattgagtcaaaccatggtaagctggagactgtctgtatatcactctctctaaactctgaactcatatattcaactatgtgtcatctccaatgacagtctcacagtcatctgaaacttatcatgttagaactatactccccacttcaacttccattctctccccataagcctgcccaggactagtattccttatctcagaaaacaatgcaaacatacacctcagtttctctaatcagaaatctagagtgatccctgaccctttgcctcaagcctcctgttcagcttatcagtaagccctgtaggttctatatccaaaatatgtcttaagtttatctaactcttgtcatctcctcttgagtatcacctcttatctgcaattgcctccctactggcctccttctttccatccttatctcctatagtctcttctccacacagcatccaaagccatcttttgaaagcacaaacatggtcactcccatgttgaaaacctttcagttgtattcccatagttcttggggaaaaaaatcaaaacttcttactacagtctgtaaagcctcacatgatttcatccttatctacttctccatagtttcctcattcagccccactacattatgatccggccacattgccctcccttcaacctcctcaaacatgccaaactctctcccaccttggggctttgaatatgccttttgtttaaatgactctttttcttttaccccatgcctggctcctacttattcttcaaacctcactcggtataactccatcatgaaggccttgcctaacatttaatctatgtactgctccctagttatttcagtcatagaattataatttgtaactacgaatttgtacacatgcttataatgaaaactataaaccactgatgaaaaaaattgaagaggacaccaaaaaaaaaaaaaaaaaaggaaagatattccatgttcatggattggaagaatcaatactgtgaaaatgttcacagtacatacacaaagcaatctacacattcaatgtaatttctatcaaaataccagtgacattcacagaaataggaaaaaccctaaaatttatacagaacgataaaagacccagaatagccaaagctatcctaaggtaaaaagaaaaaaaaaaaaaaaggaggaatcatattacctgacttcaaattatactacaaaggaatagtaaccaaaacagcatgctactgccatgaaaatagacacatagaccaatggaacagaatagagaatccagaaagaaatccacacatctatagtgaactcatttttgggaaaggtgtcaagaacaaaattggattattagattttttttcctatagagttgtttggagctcctcatgtgttctggttattaatccctcgtcagatgggtagtttgcatatattttcttccattttgtgggttgtctcttcactttgttgattgctttctttgctgtgcaaaagctttttaccttgatgtgatcccatttgtccatttttgcttaggttgcctgcgagttaaacctcaagaacatacattggggaaaagacagtctcttcaaaaagtgtgctgaaaaactgaatatccatatgcagaagaataaaactagacctctatctctcaccacataaaaaatcaaacataaatggattaaagaattgaatctaagacctcaaactatgaaaccactacaagaaaacattgggagaactctccaggacattggactgggcaaagatttcttgagtaataccccacatgcacaggcaacctaagcaaaaatggacaaatgggatcacatcaaggcaaaaagcttttgcacagcaaagaaaacaatcaacaaagtgaagagacaacccacaaaatggaagaaaatatatgcaaactacccatctgacgagggattaataaccagaacacatgaggagctccaaacaactctataggaaaaaaaatctaataatccaattaaaaaatgggcaaaagacttgaatagacatttctcaaaagaagacatacaaatggcaaacaggcatatgaaaaggtactcaacgtcactgattatcagagaaatgcaaatcaaaactacaatgagatatcatctcatcccagataaaatggcttttatccaaaagacagacaataatgaatgctggtgaggatgtggaaaaaagggaacccttgtaaactgttgatcggaatgtaaattaatacaaccactatggagaacagtttggaggtttctcaaaaaactaaaaatagagctaccatatgatccagcaatcccactgctcagtatataccccaaagaaaagaaatcagtatatcacagaggtatctgtactcctatgttagttgtggcactgtctacaatagccaagatctggaagcaacctaagtgtctaccaacagatgaatggataaagaaaatgtggcccttatatacaatggagtactattcagtcatttaaaaaatgagatcctgtcatttgcaacaacatgaatgaaactggaggtcattactttaagtgaaataagccaggcacagaaagacaaacatcttgtattctcatttatttatggatctaaaaatcaaaacaattgaactcatggagatagagaaggatggttaacagaggctgagaagagtagtagaggggtgaaggggaggtagggatggttaatgggtaccaaaaaaaaaaaaaatagaatgaataagacctagtatttggctgagcaggatggttcacatctgtaatcccagcactttgggaatttggcagactgcttgagcccaggagtttaagaccagcctgggcaacatattaagaccctgtctctacaaaaaaaattaaaaaattagccaggcatggtggcttgtgcctgtagtcccagctacttgggaggctgaggtgggaggattgcctgagtccaggaggtcaaggctgcagtgagccaagatcatgccactgcactccagcctaggtgacacagcaagaccctgtctcgaagatagcacaacagggtgactacagtcaataataactgtaccttttaaaagaacaaagaggccgggcatggtggctcatgcctgtaattccagcactttcagaggccaaggagggcggatcacctgagttcaggagttcgagactagcctgaccaacatggagaaaccccatctctattaaaaatacaaaattagccaggcgtggtggtgcatgtctgtaatcctagctactcgggaggctgaggcaggagaatcgcttgaacctgggaggcagaagttgcagtaagccgagattgtgccattgcactccagcctgggtaacaggagcaaaattgcgtctactgctacagataaagcaagcttcatgagggaattatgcatggtttattcatcaatgcatacttattgcctagcatagtgtgtgacacatagttgatgctcaaaatatatgtttagaataaataaatcaatggatgagattttaaaaaaaacaattggagaaatagatggaaacaaagatcaaataagtatagactacaaatctcccttactaccttattcagcactcatatttcttctagatttccactacagtagatattccatattaaataatgagttactagtcatagtattaccataaggcatatgcaaataaaagaaaatccagctgtgccctactaaatatactatgttatgattgtaataagcaaattaatggtataatatgaaactcaagatctcaattgtttaattttctgagctatataaaaaatggataggcagagaaacaagctcaaagcagcaaatgaataacagaaaaagtctggtttaagattcattgatattctgaagtcaatcacaggaaaacttaacaaatacagacagcattgtgttatttgtcataattatacaaactgcacaaattggtggctaaattacatgatttcccctcacatctcatgtctgtacattttactttttaaaatgtgtccagaagtatatggttttaaaattccatggtaaaaagtccaagagctgaaatatgatgaccatattttcccaacaaaaaaatcagaatgttgacctaatttaaactaagaatattgaaaatctgtaatatagtttaagtattatcatttccatattatggatatacacggactcagccatgttatctatccaaggtgagtgataattgtgagaggtagaatcagtattcaaataggtttttcttattcagaggctcatgctgtttccacttctcaggaacagtgctttctgctgtttttttttttttttttaataaactttattttttagagcgcttttaggttcacagcaaaattgaacagaaggtagacagatttcctatatatcccctgcctccacacatgcatatagcctcccccattatcaacatctccgaccaaagtggtacatttgttacaattgatgtgctgctcattttctcattcattccaatatgaactgaatacctactaggtgtttttgtgaacaaatggatattagaaagaaaatgcaactcatccctaaagttaataaatactccccaaatcaaacaaaacctaaactgagggaacagaccacctgaaacaaagaagatcaactgtctttttctttgcaaagtctgctctaacagcatgtgacatccatttgaggcttccagccaatcagaaaatcatcaaaacaagatgcaatgtttccaaatcccagccaaagctcatgaaattaagctggtgaaagcaatgccacaaatttaatgttgggcatactaaattttgacacctaaagatgtaagagactagaatgttaaaaacataaaagatgttttcaaaaatctattgttatattttgctcatgagactcaaataaaaaaaagagcaaaccaattgcaaagacaactcaatatactgtatacacatgctgctaggatgaacagccttctagtcattcattcgattatccatccatccatccattatccatctagctagctggccatcaaacatcattgagtgcctactacatgtttggcactctgctgaacagtatacaggataaagtgcagtgacacaatcacagctcactgcaggctcgagccccaccgggctcaaatgattcacctcagtctgccgtgtagctaggactacaggcacgtaccacccatgaccagctaattttttctattttttgtagagacaaaatatgttgcctaggctggtctcaaactatgttgcctaggctggtctcgaactcctacactccagcaatccaactgccttggcctcccaaagtgctgggattacaggcacaagccaccacaccaggcccatttttttctttaaaccagaggttgaaaactggaagctcacaggaagaatcctccctgtagaactgttctgtataactttcatggtatttatttttaattaatctgatttttagacaagagagatacacagagactccaacaattccctaagtcttatataggcccaattcatatattcatgcttccctcctggctttggtaagcaaatgagttctgactcttgctttgcactgtgctgccttctctaatagtacaggctgaatttaattaagaaagttacttcccttccatcccaattctcaaaggcaaaggttttttcttctccctgagaacactacctcatatttgagtaatactttcataaaaataacattttttgtgtaggacattttataaggatgcaaagataaatgaatttgctcatggttacaaagccaattagggctagacctggggattcctggctcagttcaggagtcttattaatattaagccttgagcccaaaggaccaaacagcatatcccacaacaattcatttatggctcaattctttcttttcagaaaaatatttatatcaaacttaaatgaacatattgaattctgaataacatctttcataggtataaggaaatctaaaagatacagagtagtatctgtgtgctccttatatattctaaattgtgattaatgtcttcaaatacaaacatgttaatcaattatcacaaatgaaatgtaagaataacaaagtgactaaagagtttttaaagaactaaagactagaaactagaatttgatacactgccagcatctatacatatgtgaagtattgaagatttcccaaacctcagttatagtagctataaactaagtttgttatcattggccaccaaagaacagtaggatagtttttcagtgaaaaggagaaatcaaaatccttatattaaatggagttagggaattgtgaacaatctgtagtgcctattttccctcctgtctttcttttgtttgttctttcattctttcttccttttcttcctttcttttctctctctctttctctttctttctttttttccgagacagagtcttgctctgtcactcaggctggagtgcagtggcacaatcttggctcactgcaacctctgcctcccacgttcaagcaattctcctgcctgagcctcccgagtagctgggattataggcacctgccaccgcacccaggtaatttttgtatttttagtagagatggggtttcaccatgttgaccaggctggtctcaaactcctgacctcgtgatctgcccacctcggcctcccaaagtgctgggattacaggtatgagccaccacacccagcccaccactgcgcctggccctactttgttaataaaatgaaataattatgaaaagtacacgtgggagatgaaatcagaacttgaaaatttccccaaaactttaaaatgaactcaaacttttacaggcttcaaggagaaaaacaaacaaacaaacaaacatctccaaacatttcaattgaggaaaaaactgcattatttgcttcttaagatgtacaggaagtcatttggttacagaactcaatggctgaaagcttcagggagatacaaagattgatacatagctgtcctattatacaatgccagtcttctaaaatgagaatgtaatttttaatatttggaaaatgatgtctggagcatactcactgatgtctggagcatattactgatggaagtgtaaactaatacaacttttctagaaagcaatttggcacacttaccaaaacctttcaaaaactcacagccttttctctagtaaatcccttttgatgtgcatatttctttctcccactatcatcaccatcaaaagaatccaacaaatttgaaatcatcaaggatttataactggccttaagatagtagcctggacttttccctgcacctcattatatactcaaggtagcattctattctcacatggagctttacaatacatgcttttaaataaagatgctctggccgggcgcagtggctcacacctgtaatcccagcactttgggggaggcctaggcaggtggatcacaaggtcaggagttcgagaccagcctggccaaaatggtgaaacctcgtctctattaaaactgcaaaaattagctgggcgcagtggcgggcacctctaatcccagctactcaggagactgaggcaggagaatcgcttgaacccggggggtggaggttgcagtgagctgagatcgcaccactgcactctagcctgggcaacagagcaaaactccatctcaaaaataacaaataaataaaataaagatgctcccagctggaagtctaccaagttatcatcaaagacaatttttttctttttaaaaatttttctgtagagacggggtatcactatgttactcaggctggtcttgaactcctgggctcaagcgatcctctcgcctcagcctctcaaagtgtttttattaaaggcatgagccaccatgcccagcccaatttttttcttaatggccaaatcataatcttatgcctagaatccttttgtgattcataagcatggtgactgggttttcatgcttttgtgtgagatgtgcctcccttaaaccttgttacaatatcagcacattacctgtctgatgtgaaaagaaataaaatagaaaagaaaaaagaaaaaaaaaactcttatgcttagtgacaagttgaattctggtatggtaaaaggcttctattaaaaactggtattaatttttagagttagtaagttcaaagaatttaaactctgaataatgagtaccttttatattttgggttatatctttgtaattcacacattttccaaatcctatgttaggtgtcattttattgagtgcccactatgtgcttaacagctgtaaaaagaagaaagaattttaaaagaatcagaagacacattatcctatcgtgtttcagaaaggtttctgctaatctctatagtagtcagggcaacagattagtcttaactatacatgacatactataatatctaaatataagttatactgtatataaatagaaatttttatctatgcatgatgaattgataaaactgcacattggatacactttataagttctcctggagtaaagaatggtaatgtcatcctgtatagtaaggttaaatcataacaggaaatagatatttaagtcacagaggatgagttaattctcttcctggacagcctaacttctcctgttccagactaactccttatttagtgtcttagaccagtcccctgagacctgttcctatcaattatctcctgtctcacttttatcttctatctctttccccactgccattactttggttcatttcctttagcacagaaacattttcaagtctactgcatactttaaaaacaagaaaaatatttgaccttgcattcctccatctagatataatcctttttctccttctattcatgagaactcttgtgaaaatgaatactctatttttactgtttctttacatacatatatatatgatgagtgagagaggttactatgttgcccaggctggtctcgaactcctgggctcaagcaatcctcccaccttggcttccacaagtgctgggattacaggtgtgagccactacacctggcctatattcacaatttgtttgatcaattttctcttcaacttacctcaatcaggcttctctgtcccacctctccactgaaactactgtagccaaagtcacaggtggcttccacactaccaactcataacacttttctttgtattatcgaatttctcagttgcatttgacagaattggaccattgatttcttcctaaaacttttggcacactattttctactggtcttccacaaattgctttctgattgctcctttcagtctgtcaaattctccttttctacttttaccccttacatatgggggctttcagggttctgtccttggcatctatctccatgggcattccttgagtgatgtcatctctctcacagcttcaagagactacaaacattactttaggatattttcatcactggtcttcttggatatcttactgcctaattggaacatgtttgctaacatattccacaggattacatacctcagctggtccgcaactgaactcatcttcccactaaagctttacttcttgtacttttgttaatatcatctgccatctactcagcccaaccaagctcaaagtcttcaagagttaaccagtcttctatctttatttcacctcataatccatcatcaggcctctaccacttcactttttatatatttctgtaatctatctcatcctgtctatcccaaccacaactgccttagtttgagtctatgttagttccaggacttggcaactgcaacaatccactctaaattgtaactctgaccttacatctctacataaaacttttatgttcctcactgccaaaagcagtattttttgtgtcagggttacctgtggatgcttgtaaagatgcatattcctgggtcaatctgcatttttacatatttttcaacttattctgatgcaatgtaaagcctgagtacgggctaaagtttaagtttaaatttcttaccaaggcataaaaagcctccaaggtcttggctcttgcctacttagttctctaatctagcacctccctttttctcccatcacgtgctttattatctagagtactgaattcatttacacttatccaagtgtctctggcttccatgcttttgctgttcctctttcttctcaccaagtcttatgcaacctattgcatattatgctttttttctatcaagcaggtactaacttttaactcttattaaccaaagactggggtttcttgctattgtatcataaaaaaaaaaaaaaaaaaaaaaatcaggtctttttccccagttcctgacacagagctcctaaaacccttggaatttcctgagtgacacgagtgatagaagcatctttagttttaaggaagtgtctcttggctggcccctagatagctttaggatgggagctagtcaccagaaacaccaatccttgattagaagcttgtaattttcagctccatcacataaccagggaaggagtggagattgagtcagttaccaatgaccaatgatttaatcaataatgcttactgatatggtttgggtatgtacccacctaaatctcatcttgaattgtagctcccataattcccacatgtgatgggagggagccagtgggaggtaattgaatcatggaggctggtttttcctgtgctgttctggtgatagcaagtctcacgagatctgatggttttataaagtggatttcccctgcacatggctctcttgcctgccgccatgtaagatgtccttttgctcttccttattcttccaccatgattgtgaggcctccccagccatgtggaactgtgagtccattaaaactctttcctttataaattacccagtctcaggtatgtctttattagcagcgtgagaacagactaatacagtaaataggtaccaggtagtggggcactgctataaagatacccgaaaatgtggaagcaactttggaactgagtagcaggcagaggttggaacagtttcgaggacccggaagaagacagaaaaatgtgggaaagtttggaacttcctagaaacttggagggctcagaagacaggaagatatgggaaagtttgtaacttcctagagacttgttgaatggctttgaccaaaatgctcatagcgatatggacaataaggtccaggctgaggtggtctcagatggagataaggaacttgggaactggagcaaaggtgactcttgctatgttttagcaaagagactggtggcattttgcccctgccatagagttctgtggaactttgaacttgagagagatgatttaggtatctggtggaagaaatttctaagtggcaaagtgttcaagaagaagcagcgcataaaagtttggaaaatggccgggtgtcgtggctcacacctgtaatcccagcactttgggaggctgaggtggatggaccacctgaggtcaggagtttgggaccagcctgaccaatatggtgaaactctgtctctactaaaaatacaaaaattagtcaggcatggtagcgtgcacctgtagtcccaactactcgggaggctgagacaggagaattgcttgaacccaggcggtggaggttgcagtgagccaagatcatgccactgcactccagcctgggcgacagagaaagactccatctcaaaaaaaaaaaaaaaaaaagtttgaaaaatttgcagactgatgatgtgatagaaaataacccattttctggggagaaattcaagcctgctgaagaagttgcataagtaacaaggggctgaatgttaatcaccaattatagcgctccttcaacttctattacacagttctgaagacactttaccaagagtatgtggtatccttaagtgctaaagctggacaggaccttagagattaaagatttttttctcggataagaaaaccaggactagaaagatgaaaagattgaccagagccagagttaagtggtagcaaagccagatgaatggctctcctatcgagccaatgtaatttcttcaacatcatgcagcttatactactttggggccacctatcttatttaattatatgcctatagaggatattttgttaacaacttaatacttgagatcagtagtagtgttataaaagcaagctattagcatagaacacaataaaaaaaaatcttggagcaggcatagaaatttttgtacatcttagatattataactacg
